(19) United States
(12) Patent Application Publication
(10) Pub. No.: US 2024/0044895 A1
(43) Pub. Date: Feb. 8, 2024

(54) IDENTIFICATION OF SARS-COV-2 EPITOPES DISCRIMINATING COVID-19 INFECTION FROM CONTROL AND METHODS OF USE

(71) Applicant: WISCONSIN ALUMNI RESEARCH FOUNDATION, Madison, WI (US)

(72) Inventors: Irene ONG, Fitchburg, WI (US); David O’CONNOR, Madison, WI (US); Miriam SHELEF, Madison, WI (US); Anna HEFFRON, Madison, WI (US); David BAKER, Northbrook, IL (US); Maya AMJADI, Madison, WI (US); Sean MCILWAIN, Madison, WI (US); Saniya KHULLAR, West Windsor, NJ (US)

(21) Appl. No.: 18/245,868

(22) PCT Filed: Sep. 20, 2021
(86) PCT No.: PCT/US2021/051143

§ 371 Date: Mar. 17, 2023

Related U.S. Application Data
(60) Provisional application No. 63/080,568, filed on Sep. 18, 2020.
(60) Provisional application No. 63/083,671, filed on Sep. 25, 2020.

(51) Int. Cl. G01N 33/569; G01N 21/76; G01N 33/543; C07K 14/165; A61K 39/215

(52) U.S. Cl. CPC G01N 33/56983; G01N 21/76; G01N 33/543; C07K 14/165; A61K 39/215; G01N 2333/165

(57) ABSTRACT

The present invention is directed to peptides for use in the detection of antibodies against SARS-CoV-2, which are indicative of past SARS-CoV-2 infections. Additionally, assays and methods of distinguishing patients having had a prior infection from those vaccinated patients are also provided. Additionally, vaccine compositions for use in eliciting anti-SARS-CoV-2 immune response are provided along with methods of producing antibodies and methods of eliciting an immune response.

### CROSS-REFERENCE TO RELATED APPLICATIONS

[0001] This application claims priority to U.S. Application No. 63/080,568 filed on Sep. 18, 2020 and U.S. Application No. 63/083,671, filed on Sep. 25, 2020, the contents of each are incorporated by reference in their entireties.

### STATEMENT REGARDING FEDERALLY SPONSORED RESEARCH

[0002] This invention was made with government support under OD017850 and HHSN272201600007C awarded by the National Institutes of Health. The government has certain rights in the invention.

### SEQUENCE LISTING

[0003] Sequences can be found in Table 1 and 2 and in the Tables in the Figures and are incorporated herein by reference in its entirety.

### BACKGROUND

[0004] The immune response to severe acute respiratory syndrome coronavirus 2 (SARS-CoV-2) infection remains poorly understood. Protective antibodies have been posited for some coronaviruses, such as Middle Eastern respiratory syndrome coronavirus (MERS-CoV) and severe acute respiratory syndrome coronavirus (SARS-CoV), while antibody-dependent enhancement has been documented for other coronaviruses, such as feline infectious peritonitis. SARS-CoV-2, the cause of the pandemic illness of coronavirus infectious disease 2019 (COVID-19), is the most recent coronavirus to emerge as a human pathogen, and has caused at least 4.68 million deaths worldwide since December 2019. Yet, our understanding of the breadth and implications of the anti-SARS-CoV-2 antibody response remains limited.

[0005] Antibody responses against two proteins in SARS-CoV-2, the spike (S) or surface protein and the nucleocapsid (N) protein, have been documented. All serology-based testing platforms in production to date use one or both of these proteins as antigens and have sensitivities ranging from 79.6% to 91.7% at least a month after symptom onset. Little is known about antibody responses to the virus' other structural and non-structural proteins, including the membrane (M) protein, which is the most abundant protein in the virion, or the accessory proteins in the virus' largest open reading frame (i.e., orflab).

[0006] SARS-CoV-2 infection results in highly variable outcomes, ranging from asymptomatic infections to hospitalizations, intubations, and death. Differences in the immune response are thought to contribute to these differences in outcomes, but this, too, is not well-defined. Further, little is known about the cross-reactivity of anti-SARS-CoV-2 antibodies with other coronaviruses.

[0007] Thus, there remains a desperate need in the art for a better understanding of the humoral response against SARS-CoV-2. This understanding will play a critical role in the development of appropriate diagnostics, vaccines, and medical countermeasures.

### SUMMARY OF INVENTION

[0008] In the present disclosure, the inventors used an ultra-dense peptide microarray to profile antibody binding throughout the full SARS-CoV-2 proteome in severely and mildly ill patients. Additionally, they used this microarray to profile cross-reactive binding of anti-SARS-CoV-2 antibodies to other coronaviruses. In one aspect, the disclosure provides a method of detecting the presence of SARS-CoV-2 antibodies in a sample, the method comprising: contacting the sample with one or more peptide selected from SEQ ID NO:1-16 and Tables 1, 2, 6, 9-12 or a peptide having at least 90% sequence similarity to a peptide of SEQ ID NO:1-16 or in Tables 1, 2, 6, 9-12; and detecting the binding of one or more antibodies from the sample to the one or more peptide by a detection agent, wherein the presence of the one or more antibodies within the sample indicates the presence of antibodies against SARS-CoV-2. In some aspects, the presence of antibodies signifies a past SARS-CoV-2 infection. In some embodiments, the detecting of the antibodies can distinguish between a subject having had SARS-CoV-2 and a vaccinated subject, as described herein. In some aspects, the detecting of the antibodies can distinguish a person either vaccinated or having had CoV-2 from a naïve subject. In other aspects, the detecting of the antibodies can distinguish between a subject having had SARS-CoV-2 and a vaccinated subject, or a subject that has had neither.

[0009] In another aspect, the disclosure provides an immunoassay for detecting antibodies to SARS-CoV-2 in a biological sample, the assay comprising: a capture agent comprising one or more peptides selected from SEQ ID NO:1-10 and Tables 1, 2 and 9-12 or a peptide with at least 90% similarity to one or more peptides in Tables 1. 2 and 9-12, and a detection agent capable of binding to the one or more antibodies that bind to the capture agent.

[0010] In a further aspect, the disclosure comprises a method of detecting and distinguishing a subject infected with SARS-CoV-2, subject vaccinated and an uninfected individual comprising obtaining a sample from a subject; contacting the sample with the immunoassay described herein, wherein detection of the peptide to the membrane protein and to a spike peptide can distinguish between the subjects that have had SARS-CoV-2 and a subject vaccinated vs a naïve subject.

[0011] In another aspect, the disclosure provides a vaccine composition comprising an adjuvant and one or more peptides selected from Tables 1, 2, 6 and 9-12 or a peptide having at least 90% sequence similarity to one or more peptides in Tables 1, 2, 6, and 9-12. In some embodiments, the peptides comprise a 16-mer or longer of a peptide in Tables 1, 2 6, 9-12.

[0012] In another aspect, the present disclosure provides use of the vaccine composition described herein for eliciting an immune response in a subject against SARS-CoV-2.

[0013] In a further aspect, the disclosure provides a polynucleotide construct comprising a heterologous promoter region and a nucleotide sequence encoding at least one peptide selected from SEQ ID NO:1-16 and Tables 1, 2, 6, and 9-12 or a peptide having at least 90% sequence similarity to one or more peptides of SEQ ID NO:1-16 and in Tables 1, 2, 6, and 9-12.

[0014] In another aspect, the disclosure provides a method of eliciting an immune response to SARS-CoV-2 in a subject, the method comprising administering an effective amount of the vaccine composition described herein to the subject to elicit an immune response.

[0015] In a further embodiment, the disclosure provides a kit comprising the immunoassay for SARS-CoV-2 as described herein.

[0016] In yet another aspect, the disclosure provides a method of detecting the presence of antibodies against a coronavirus in a sample, the method comprising: contacting the sample with one or more peptide selected from Tables 12A-12C, a homologous protein to one or more peptide of Tables 12A-12C, or a peptide having at least 90% sequence similarity to a peptide in Tables 12A-12C; and detecting the binding of one or more antibodies from the sample to the one or more peptide by a detection agent, wherein the presence of the one or more antibodies within the sample indicates the presence of a past the coronavirus infection within the subject.

[0017] In yet another aspect, the disclosure provides a method of detecting and distinguishing a subject infected with SARS-CoV-2 or a subject vaccinated comprising obtaining a sample from a subject; contacting the sample with the immunoassay comprising a capture agent comprising at least one peptide of the membrane protein of SEQ ID NO:1 or from Table 2 and a detection agent; wherein detection of the peptide to the membrane protein can distinguish between a subject having had SARS-CoV-2 and a subject vaccinated.

[0018] In yet another aspect, the disclosure provides a method of testing a convalescent plasma sample for antibodies to SARS-CoV-2, the method comprising: obtaining a plasma sample; contacting the sample with the immunoassay of any one of claims 11-22, wherein detecting at least one peptide confirms the convalescent plasma contains anti-SARS-Cov2 antibodies.

### BRIEF DESCRIPTION OF THE DRAWINGS

[0019] FIG. 1. Patients and controls show reactivity to a poliovirus control. Sera from 20 controls collected before 2019 were assayed for IgG binding to the full proteome of human poliovirus 1 on a peptide microarray. Binding was measured as reactivity that was >3.00 standard deviations above the mean for the log₂-quantile normalized array data. Patients and controls alike showed reactivity to a well-documented linear poliovirus epitope (start position 613 [IEDB.org]; orange shading in line plot). The data used in this analysis can be accessed online at: github.com/Ong-Research/UW_Adult_Covid-19. COVID-19, coronavirus disease 2019: IgG, immunoglobulin G.

[0020] FIG. 2. Control sera show reactivity to CCCoVs and to SARS-CoV. MERS-CoV, and SARS-CoV-2. Sera from 20 controls collected before 2019 were assayed for IgG binding to the full proteomes of 9 CoVs on a peptide microarray. Viral proteins are shown aligned to the SARS-CoV-2 proteome with each virus having an individual panel; SARS-CoV-2 aa position is represented on the x-axis. Binding was measured as reactivity that was >3.00 standard deviations above the mean for the log₂-quantile normalized array data. Peptides for which >40% of the controls showed binding are indicated by a black diamond. The data used in this analysis can be accessed online at: github.com/Ong-Research/UW_Adult_Covid-19. aa, amino acid; CCCoVs, “common cold” CoVs; CoV, coronavirus: IgG, immunoglobulin G; MERS-CoV, Middle Eastern respiratory syndrome coronavirus; SARS-CoV, severe acute respiratory syndrome coronavirus; SARS-CoV-2, severe acute respiratory syndrome coronavirus 2.

[0021] FIG. 3. Anti-SARS-CoV-2 antibodies bind throughout the viral proteome. Sera from 40 COVID-19 convalescent patients were assayed for IgG binding to the full SARS-CoV-2 proteome on a peptide microarray. B cell epitopes were defined as peptides in which patients' average log₂-normalized intensity (black lines in line plots) is 2-fold greater than controls' (gray lines in line plots), and t test statistics yield adjusted p-values <0.1: epitopes are identified by orange shading in the line plots. Epitopes having at least 100% specificity and at least 80% sensitivity for SARS-CoV-2 infection are indicated by a black arrow. The 1-M-24 epitope, which had the highest combined reactivity, specificity, and sensitivity of all epitopes we defined, is indicated by a black star. The data used in this analysis can be accessed online at: github.com/Ong-Research/UW_Adult_Covid-19. aa, amino acid; COVID-19, coronavirus disease 2019: IgG, immunoglobulin G; SARS-CoV-2, severe acute respiratory syndrome coronavirus 2.

[0022] FIG. 4. Anti-SARS-CoV-2 antibodies to S protein show the highest binding in the fusion cleavage site. Binding reactivities were localized on a coordinate file for a trimer of the SARS-CoV-2 S protein using a dark blue (low, 0.00 fluorescence intensity) to red (high, 9.00 fluorescence intensity) color scale. (A) COVID-19 convalescent patients, (B) naïve controls, and (C) the difference between patients and controls are shown. The highest reactivity occurred in the fusion peptide (aa 788-806) and at the base of the extracellular portion of the molecule (aa 984-1163), with lower reactivity in the receptor-binding domain (aa 319-541). (D) Key regions of the S protein are labeled and colored. In the S1 subunit (aa 14-685), the NTD (aa 14-305) is red, and the RBD (aa 319-541) is blue. Within the RBD, the RBM (aa 438-506) is yellow, and the residues that bind to the ACE2 receptor (aa 446, 449, 453, 455-456, 473, 475-476, 484, 486-487, 489-490, 493, 496, 498, 500-502, and 505) are in black. In the S2 subunit (aa 686-1273), the FP (aa 788-806) is green, the HR1 (aa 912-984) is orange, and the base of the extracellular part of the protein (base, roughly an 1140-1160) is purple. The remainder of the protein is gray. The data used in this analysis can be accessed online at: github.com/Ong-Research/UW_Adult_Covid-19. AA, amino acid; ACE2. angiotensin converting enzyme 2; COVID-19, coronavirus disease 2019: FP, fusion peptide; HR1, heptad repeat 1; NTD. N-terminal domain; RBD, receptor-binding domain; RBM, receptor-binding motif; S, spike: SARS-CoV-2, severe acute respiratory syndrome coronavirus 2.

[0023] FIG. 5. Anti-SARS-CoV-2 antibodies may cross-react with other CoVs. Sera from 40 COVID-19 convalescent patients were assayed for IgG binding to 9 CoVs on a peptide microarray; averages for all 40 are shown. Viral proteins are aligned to the SARS-CoV-2 proteome; SARS-CoV-2 an position is represented on the x-axis. Regions that may be cross-reactive across all β-CoVs (*) or cross-reactive for SARS-CoV or MERS-CoV (#) are indicated. Gray shading indicates gaps due to alignment or lacking homologous proteins. Cross-reactive binding is defined as peptides in which patients' average log₂-normalized intensity is 2-fold greater than controls' and t test statistics yield adjusted p-values <0.1. The data used in this analysis can be accessed online at: github.com/Ong-Research/UW_Adult_Covid-19. aa, amino acid, β-CoV, betacoronavirus; CoV, coronavirus: COVID-19, coronavirus disease 2019; IgG, immunoglobulin G; MERS-CoV. Middle Eastern respiratory syndrome coronavirus: SARS-CoV, severe acute respiratory syndrome coronavirus; SARS-CoV-2. severe acute respiratory syndrome coronavirus 2.

[0024] FIG. 6. Higher IgG binding to SARS-CoV-2 peptides in COVID-19 convalescent patients compared to controls by ELISA. (A) IgG binding to SARS-CoV-2 peptides in COVID-19 convalescent (n=40) and naïve control (n=20) sera was measured by ELISA. Bars indicate mean abs +/− SEM and ****p<0.0001 by t test. (B) Anti-SARS-CoV-2 peptide IgG detected by ELISA was compared to array findings by Spearman rank-order correlation (Spearman correlation coefficient, p) for COVID-19 convalescent (n=40, closed circles) and control (n=20, open circles) sera. The data used in this analysis can be accessed online at: github.com/Ong-Research/UW_Adult_Covid-19. abs. absorbance: COVID-19, coronavirus disease 2019; ELISA, enzyme-linked immunosorbent assay; IgG, immunoglobulin G; SARS-CoV-2, severe acute respiratory syndrome coronavirus 2; SEM, standard error of the mean.

[0025] FIG. 7. Disease severity correlates with increased antibody binding in specific SARS-CoV-2 epitopes. IgG reactivity against SARS-CoV-2 epitopes identified by peptide microarray in COVID-19 convalescent patients who were never hospitalized versus intubated patients showed statistically significant increases in reactivity in intubated patients for 11 epitopes. The data used in this analysis can be accessed online at: github.com/Ong-Research/UW_Adult_Covid-19. COVID-19, coronavirus disease 2019; IgG, immunoglobulin G; SARS-CoV-2, severe acute respiratory syndrome coronavirus 2.

[0026] FIG. 8. Anti-membrane, but not anti-nucleocapsid or anti-spike receptor binding domain, antibodies distinguish between COVID-19 vaccination and past COVID-19 infection 12 months post-symptom resolution. A. Enzyme-linked immunosorbent assay (ELISA) was used to quantify IgG that binds a biotinylated peptide from SARS-CoV-2 membrane (ITVEELKKLLEQWNLV (SEQ ID NO:1)-K-biotin) and nucleocapsid protein (QTVTLLPAADLDDFSK (SEQ ID NO:3)-K-biotin) with results reported as absorbance (abs). Ig that binds to SARS-CoV-2 spike receptor binding domain (RBD) was detected using Lumit™ Dx SARS-CoV-2 Immunoassay (Promega) with results reported as sample/calibrator (S/C). Sera from the following subjects were tested in all assays: COVID-19 naive subjects collected prior to 2019 (n=60), COVID-19 vaccinated subjects with no known COVID-19 infection (Vax n=21), sera from COVID-19 convalescent patients (SARS-CoV-2 PCR+ at diagnosis) collected ˜5 weeks (5w, n=101), ˜3 months (3m, n=98), ˜6 months (6m, n=94), and ˜12 months (12m) post symptom resolution. By 12 months, 73 convalescent subjects had received at least one COVID-19 vaccine dose (12m Vax) and 16 were unvaccinated (12m Unvax). Black dots represent individual samples and gray bars indicate medians. Dashed lines indicate potential cutoffs for positive antibody detection. Kruskal Wallis test with Dunn's multiple comparisons post-test was used to determine if groups were different as compared to naive (#p<0.0001) or Vax (& p<0.001). Mann Whitney test was used to determine if there was a difference between 12m Unvax and 12m Vax groups (**** p<0.0001 or not significant, ns). B. Receiver operating characteristic (ROC) curves were generated using ELISA absorbance values for anti-membrane or anti-nucleocapsid IgG with sera from naive and 5w COVID-19 convalescent patients. Area under the curve (AUC) and Wald 95% confidence intervals are in parentheses. C. Using the cutoffs in (A), the percent positive (black bars) and percent negative (gray bars) results were calculated for naive sera (n=60), sera from vaccinated individuals with no COVID-19 infection (n=21), and 5w (n=121), 3m (n=115), 6m (n=98), and 12m (n=100) COVID-19 convalescent sera.

[0027] FIG. 9. Anti-SARS-CoV-2 antibody binding patterns do not vary with neutralizing titer. Sera from 40 COVID-19 convalescent patients were assayed for IgG binding to the full SARS-CoV-2 proteome on a peptide microarray. B cell epitopes were defined as peptides in which patients' average log₂-normalized intensity (black lines in line plots) is 2-fold greater than controls' (gray lines in line plots) and t test statistics yield adjusted p-values <0.1; epitopes are identified by orange shading in the line plots. Data are grouped by their neutralizing titer. COVID-19, coronavirus disease 2019; IgG, immunoglobulin G; SARS-CoV-2, severe acute respiratory syndrome coronavirus 2.

[0028] FIG. 10. Alignment of epitopes in human and animal CoVs for which antibodies in sera from COVID-19 convalescent patients showed apparent cross-reactive binding. Alignments were performed in Geneious Prime 2020.1.2 (Auckland. New Zealand). CoV, coronavirus; COVID-19, coronavirus disease 2019.

[0029] FIG. 11 Specificity and sensitivity for past SARS-CoV-2 infection in 40 COVID-19 convalescent patients compared to 20 naïve controls of individual 16-mer peptides comprising epitopes throughout the full SARS-CoV-2 proteome. COVID-19, coronavirus disease 2019; SARS-CoV-2, severe acute respiratory syndrome coronavirus 2. doi.org/10.1371/journal.pbio.3(0)1265.s004

[0030] FIG. 12. Epitopes paired with the 1-M-24 epitope obtained AUC-ROC of 1.0 for SARS-CoV-2 infection in 40 COVID-19 convalescent patients and 20 naïve controls using leave-one-out cross validation with linear discriminant analysis. AUC-ROC, area under the receiver operating characteristic curve; COVID-19, coronavirus disease 2019; SARS-CoV-2, severe acute respiratory syndrome coronavirus 2.

[0031] FIG. 13. Comparison of antibody binding in SARS-CoV-2. B cell epitopes in 8 intubated COVID-19 convalescent patients compared to 25 symptomatic but never hospitalized COVID-19 convalescent patients compared by multilinear regression accounting for age, sex, immunocompromising conditions, and Charlson comorbidity index score. COVID-19, coronavirus disease 2019: SARS-CoV-2, severe acute respiratory syndrome coronavirus 2.

[0032] FIG. 14. Cross-reactive binding of antibodies against other CoVs in 40 COVID-19 convalescent patients compared to 20 naïve controls. CoV, coronavirus; COVID-19, coronavirus disease 2019.

[0033] FIG. 15. Cross-reactive binding of antibodies in 40 COVID-19 convalescent patients compared to 20 naïve controls in protein motifs in other CoVs aligned to SARS-CoV-2. CoV, coronavirus; COVID-19, coronavirus disease 2019; SARS-CoV-2, severe acute respiratory syndrome coronavirus 2

[0034] FIG. 16. Supporting information tables (3 tables) show data relevant to the Methods for this study. Table A contains the proteins represented on the array, including the GenBank accession numbers and the number of replicates of reach peptide in those proteins. Supporting information Table B contains the characteristics of the 40 COVID-19 convalescent patients and the 20 naïve controls whose sera were used in this study. Supporting information Table C contains the characteristics of the 40 COVID-19 convalescent patients according to hospitalization status. COVID-19, coronavirus disease 2019.

[0035] FIG. 17. A schematic depiction of an immunoassay peptide array of the present invention.

[0036] FIG. 18. Tables 9A-12C provide the SARS-CoV-2 epitopes that are contemplated as part of the present invention. These epitopes are contiguous peptides in which the average log 2-normalized intensity in COVID-19 patients was at least 2.0-fold greater than that in controls.

### DETAILED DESCRIPTION

[0037] The present disclosure describes several novel, sensitive, and specific peptides in the SARS-CoV-2 proteome that can be used for many different methods and to build kits and assays. For example, the present disclosure describes several peptides in the SARS-CoV-2 proteome that can differentiate people who are currently infected or were previously infected with SARS-CoV-2, people who received the vaccine only (and no prior infection) or people who have never been infected with this virus or vaccinated. The peptides of the present invention may also be used to produce diagnostic tests for SARS-CoV-2 infection or to produce prophylactic and/or therapeutic vaccines that elicit a protective immune response against SARS-CoV-2. The present invention provides peptides (e.g. epitopes or peptides comprising all or part of epitopes) that generate an immune response in a subject against SARS-CoV-2. The inventors found that SARS-CoV-2 infection induces antibodies against peptides found in both structural and non-structural proteins (see Example 1). Specifically, the inventors identified peptides comprising epitopes within the SARS-CoV-2 membrane protein, spike protein, nucleocapsid protein, and several nonstructural proteins. The inventors also discovered that more severely ill SARS-CoV-2 patients exhibit higher-magnitude antibody responses against certain epitopes in SARS-CoV-2. Further, they demonstrated that some antibodies produced against SARS-CoV-2 are cross-reactive with other similar and dissimilar coronaviruses, including “common cold” coronaviruses, other deadly human pathogens, and close relatives of SARS-CoV-2 that have not yet jumped into humans.

[0038] Thus, in some embodiments, the present invention provides diagnostic assays, kits, and methods of detecting the presence of antibodies against SARS-CoV-2 in a subject. The presence of the antibodies allows for the identification of subjects who have had a prior SARS-CoV-2 infection. Additionally, methods of screening convalescent sera are provided, which would allow for testing and treatment of subjects having a SARS-CoV-2 infection. Further, the present invention provides compositions and vaccines for producing an antibody response in a subject against SARS-CoV-2.

[0039] In one embodiment, peptides identified in the M protein can be used as a diagnostic to distinguish people that have had a prior infection from vaccinated people. The M protein peptides are superior to peptides used currently in diagnostics (current methods use nucleocapsid peptides or proteins) as antibody titers to nucleocapsid are reduced over time, while antibody titers to M protein are detectable at higher levels for longer periods of time, allowing for better diagnostic tools. As described in Example 2, antibodies that bind to peptides of the M protein are detectable over a year after initial infection while titers to nucleocapsid are reduced, provide an advantage to these peptides as diagnostic tools.

[0040] In another embodiment, diagnostic assays, kits and methods of detecting and distinguishing a subject that has had a previous SARS-CoV-2 infection or have been vaccinated against SARS-Cov-2 can be detected or distinguished using the peptides of the present invention.

[0041] In another embodiment, the epitopes described herein can be used to immunize an animal or human and produce antibodies reactive against these epitopes (including, for example, monoclonal antibodies, chimeric antibodies, humanized antibodies, etc.). These isolated antibodies against epitopes described herein can be used individually or in combination for lateral flow assay or other methods of detecting antigen binding to antibodies, i.e. photon, laser, etc. In some embodiments, these antibodies can further be used for therapy. Using the peptides that were found to be cross-reactive with other coronaviruses, the assays, kits, methods, compositions, and vaccines disclosed herein may be adapted for use with other closely related viruses (e.g., MERS, SARS-CoV), including those from bat and pangolin coronaviruses, as well as pre-emergent coronaviruses (e.g., SARS-CoV-3, SARS-CoV-4).

[0042] As described in the Examples, the inventors characterized antibody binding to the full SARS-CoV-2 proteome as well as to the proteome of 6 other human coronaviruses, 21 bat coronaviruses, and pangolin coronaviruses using an ultra-dense peptide array. The reference proteomes of these viruses were tiled on the array as overlapping 16-mer peptides with 1 amino acid offsets. Using secondary antibodies that detect bound IgG with convalescent serum from the UW COVID-19 biobank, the inventors assayed 40 PCR-confirmed positive samples and 20 control samples that were collected before the onset of the pandemic. The results were analyzed to identify peptides that were present at significantly different levels in SARS-CoV-2 infected and uninfected patients.

[0043] Peptides that exhibited a 2-fold or greater difference between these patient groups are presented in Tables 1 and 2. Additionally Table 9A (FIG. 19) shows peptides with a p value less than 0.01; Table 9B (FIG. 19) shows peptides with a p value less than 0.1) identified by the methods described herein, and the top 10 peptides are presented in Table 2 which are derived from the peptides of Table 10. Further, peptides that showed a statistically significant difference between severely ill hospitalized patients and the mildly ill, non-hospitalized patients are presented in Tables 11A-11B (Table 11A shows the top 10 peptides; Table 11B shows peptides with a p value less than 0.01). These peptides may be useful to stratify or anticipate disease severity during testing and diagnosis. Thus, combinations of these peptides can be used for kits, assays and methods described herein.

[0044] As described in Example 1, the highest magnitude binding of anti-SARS-CoV-2 antibodies from human sera occurred for an epitope in the N-terminus of M protein, with high specificity and sensitivity. Antibodies produced after infection with SARS-CoV-2 reacted with epitopes throughout the proteomes of other human and nonhuman CoVs, recognizing homologous regions across all CoVs. Thus, M epitopes are highly relevant to diagnostic and potentially to vaccine design. SARS-CoV anti-M antibodies can synergize with anti-S and anti-N antibodies for improved neutralization, and M has been used in protective SARS-CoV and MERS-CoV vaccines. Notably, some of the highest binding we observed in the S protein occurred at the base of the extracellular portion of the protein, which would be the site of the putative interaction between SARS-CoV-2 S and M.

[0045] The ACE2 binding site and the RBD in general are not as reactive, by these methods, as expected, suggesting that other, less-investigated epitopes may be playing a larger role in immunity to SARS-CoV-2 than is currently appreciated, which is further bolstered by the correlation of some of this binding with neutralizing titers. Our results, in concert with prior knowledge of anti-SARS-CoV antibodies, provide evidence that epitopes in M, particularly the 1-M-24 epitope (SEQ ID NO:1) as well as other novel epitopes identified are targets in SARS-CoV-2 diagnostics, vaccines, and therapeutics.

[0046] Antibodies produced in response to SARS-CoV-2 infection appear to bind peptides representing homologous epitopes throughout the proteomes of other human and nonhuman CoVs. Peptides of the present invention demonstrate broad cross-reactivity in some homologous peptide sequences which can be used in the development of pan-CoV vaccines, especially given that antibodies binding to 807-S-26 and 1140-S-25, which showed potential cross-reactivity across all CoVs and all β-CoVs, respectively, are known to be potently neutralizing. Further, the methods described herein efficiently detect antibody binding to linear epitopes.

[0047] Further, more severely ill patients have significantly greater reactivity to certain epitopes in S, M, N, and ORF3a. The 9 epitopes with significantly higher magnitude reactivity in intubated patients may play a role in the overaggressive immune response known to characterize severe COVID-19, suggesting that they may be targets for treatment in or prevention of severe disease. The present extensive profiling of epitope-level resolution antibody reactivity in COVID-19 convalescent patients, confirmed by independent assays, provides new epitopes that could serve as important targets in the development of improved diagnostics, vaccines, and therapeutics against SARS-CoV-2 and dangerous human CoVs that may emerge in the future.

### Peptides, Vaccine Compositions and Methods of Use

[0048] As demonstrated in the Examples, SARS-CoV-2 infection induces antibodies against previously unreported epitopes in both structural (i.e., membrane protein and nucleocapsid protein) and non-structural proteins. Thus, the present invention provides peptides (i.e., epitopes) that specifically bind anti-SARS-CoV-2 antibodies. The inventors identified these peptides by profiling antibody binding throughout the proteome of SARS-CoV-2 and other coronaviruses.

[0049] In one embodiment, the present invention provides one or more peptides detailed in Tables 1-3, 6 and Tables 9-12, which specifically bind to SARS-CoV-2 antibodies within a sample. Additionally, the present invention provides peptides that have at least 90% sequence identity to the peptides detailed in Tables 1-3, 6, and 9-12. Suitably, the peptides comprise about 10-35 amino acids, preferably about 15-20 amino acids in length. The peptides may be used in the detection methods, immunoassays, methods of producing antibodies, or vaccine compositions described herein.

[0050] The inventors observed the most sensitive and specific antibody binding response with the SARS-CoV-2 membrane protein (see e.g., peptides in Table 2, e.g., SEQ ID NO:1-16). For example, one membrane protein epitope ITVEELKKLLEQWNLV (SEQ ID NO: 1), contained within peptide MADSNGTITVEELKKLLEQWNLVI (SEQ ID NO:17)), specifically, exhibited greater reactivity in infected patients than in controls, and this peptide could be used to discriminate infected patients from controls with a specificity and sensitivity of 100%. Further, this peptide, SEQ ID NO:1, is able to discern patients that were vaccinated from patients that had had a prior natural SARS-Cov-2 infection. This M protein peptide can be used in combination with a spike protein or peptide to distinguish between vaccinated patients and patients that have had a SARS-Cov-2 infection and patients that had neither vaccine nor infection. Given that all the vaccines available to date are based on the spike protein, vaccinated individuals do not have reactivity to membrane protein (or other SARS-CoV-2 proteins) but do have reactivity to spike protein. Individuals who had SARS-CoV-2 infection before or after vaccination will have reactivity to spike protein or peptides along with other SARS-CoV-2 proteins including M protein and nucleocapsid. The M protein peptide described herein is superior to the current methods of detecting prior infection that rely on nucleocapsid. As demonstrated in Example 2, antibody reactivity to nucleocapsid protein declines over time after infection, while antibody reactivity to our M protein peptide (e.g. SEQ ID NO:1) remains high and detectable, even a year after infection (see, Example 2). As such, the peptides comprising SEQ ID NO:1 may be used as a specific and sensitive diagnostic tool to detect prior SARS-CoV-2 infection.

[0051] In one embodiment, a method of distinguishing past SARS-CoV-2 infection vs vaccine or naïve infection is provided. The method comprises contacting a sample from an individual with an M protein peptide selected from Table 1 or 2 (for example, a peptide comprising SEQ ID NO:1), and detecting the presence of antibodies that bind the M protein peptide in the sample. The presence of antibodies to the M protein identifies a person having had a SARS-CoV-2 infection from subject only vaccinated (who would only have anti-spike antibodies 0 or who are naïve to both vaccine and SARS-CoV-2 infection (no SARS-CoV-2 antibodies).

[0052] In another embodiment, a method of distinguishing past SARS-CoV-2 infection and vaccinated subjects from naïve subjects is provided. The method comprises contacting a sample from an individual with a spike protein peptide selected from Table 1 or 2 and detecting the presence of antibodies that bind to the spike peptide in the sample. The presence of antibodies to spike protein identifies an individual that has had a prior infection or who has been immunized with a vaccine.

[0053] In a further embodiment, a method of distinguishing a person with past SARS-CoV-2 infection, a vaccinated person, or a person who has neither been vaccinated nor infected is contemplated. The method comprises contacting a sample from an individual with an M protein peptide and with a spike protein peptide from Table 1 or 2, and detecting the presence of antibodies to the M peptide, the spike peptide, both the M and spike protein or neither. For example, a sample having antibodies to spike peptide but not membrane peptide is a vaccinated individual (spike positive, M negative). A sample having spike peptide antibodies and M protein antibodies had a past SARS-CoV-2 infection (spike positive, M positive). A sample from a subject that was not vaccinated and did not have a prior infection will have no antibodies to spike peptide or membrane (M) peptide (spike negative, M negative).

[0054] The methods, assays and kits described herein can be used for any of the above embodiments. Further, two 16-mer peptide sequences found within this 24-mer membrane protein epitope could also discriminate infected from control with a specificity and sensitivity of 100% (See Examples and Table 2). Other epitopes within the membrane protein were also found to be specific to SARS-CoV-2 infection, but were not equally sensitive markers of infection.

[0055] As used herein, the terms “proteins,” “peptides” and “polypeptides” are used interchangeably to designate a series of amino acid residues connected to the other by peptide bonds between the alpha-amino and carboxy groups of adjacent residues. “Protein” and “polypeptide” are often used in reference to relatively large polypeptides, whereas the term “peptide” is often used in reference to small polypeptides, but usage of these terms in the art overlaps. Proteins may include modified amino acids (e.g., phosphorylated, glycated, glycosylated, etc.) and amino acid analogs. The peptides described herein that specifically bind to part of a SARS-CoV-2 protein are about 10 to 35 amino acids in length, more preferably about 15-20 amino acids in length, for example, 10, 11, 12, 13, 14, 15, 16, 17, 18, 19, 20, 21, 22, 23, 24, 25, 26, 27, 28, 29, 30, 31, 32, 33, 34, or 35 amino acids. In one embodiment, the peptides are 16 amino acids in length.

[0056] In some embodiments, the peptide or plurality of peptides used with the present invention do not contain a tag and are detected by methods such as photon wavelengths to detect binding to peptides or antibodies, as known in the art.

[0057] In some embodiments, the peptide or plurality of peptides used with the present invention further comprise a tag, preferably an exogenous tag or agent. The term “tag” or “agent,” as used herein, includes any useful moiety that allows for the purification, identification, or detection of the peptide(s) of the present invention. Any tag or agent that does not interfere with the ability of the peptide or peptides to bind to the antibodies within the sample may be used with the present invention. Suitable tags are known in the art and include, but are not limited to, affinity or epitope tags (e.g., cMyc, HIS, FLAG, VS-tag, HA-tag, NE-tag, S-tag, Ty tag, universal molecular identifier, magnetic beads, etc.) and florescent tags (e.g., RFP, GFP, etc.). Epitope tags are commonly used as a “purification tag”, i.e. a tag that facilitates isolation of the polypeptide from other non-specific proteins and peptides. For instance, the inventors included a 6X His tag in the peptides to allow them to be purified by nickel affinity chromatography using standard methods known in the art. In some embodiments, the epitope peptide and the tag are encoded in one nucleic acid sequence and translated concurrently. In some embodiments, the tag is cleavable and can be removed once the peptide is expressed and purified. The peptides may be linked directly, linked indirectly, or conjugated to the tag or agent. As used herein, the term “conjugate” refers to the joining of two entities by covalent bonds. The entities may be covalently bonded directly or through linking groups using standard synthetic coupling procedures. For example, two polypeptides may be linked together by simultaneous polypeptide expression, forming a fusion or chimeric protein. One or more amino acids may be inserted into the polypeptide to serve as a linking group (i.e., via incorporation of corresponding nucleic acid sequences into the vector). Other contemplated linking groups include polyethylene glycols or hydrocarbons terminally substituted with amino or carboxylic acid groups to allow for amide coupling with polypeptides having amino acids side chains with carboxylic acid or amino groups, respectively. Alternatively, the amino and carboxylic acid groups can be substituted with other binding partners, such as an azide and an alkyne groups, which undergo copper catalyzed formation of triazoles.

[0058] In some embodiments, the peptides comprise multiple tags. For example, a second tag may be included to allow for easy capture of the peptides. Further tags contemplated include, for example, biotin (e.g., via a cysteine or lysine residue), a lipid molecule (e.g., via a cysteine residue), or a carrier protein or peptide. Attachment to tags, such as biotin, can be useful for associating the peptide with ligand receptors, such as avidin, streptavidin, polymeric streptavidin (see, e.g., US 2010/0081125 and US 2010/0267166, both of which are herein incorporated by reference), or neutravidin. Avidin, streptavidin, polymeric streptavidin, or neutravidin, in turn, can be linked to a signaling moiety (e.g., an enzyme, such as horse radish peroxidase (HRP) or alkaline phosphatase (ALP) or β-galactosidase (β-GAL) or other moiety that can be visualized, such as a metallic nanomaterial such as nanoparticle, nanoplate, or nanoshell (e.g., colloidal gold), a fluorescent moiety, or a quantum dot) or a solid substrate (e.g., an Immobilon™ or nitrocellulose membrane or Porex® membrane). Alternatively, the peptides of the invention can be fused or linked to a ligand receptor, such as avidin, streptavidin, polymeric streptavidin, or neutravidin, thereby facilitating the association of the peptides with the corresponding ligand, such as biotin and any moiety (e.g., signaling moiety) or solid substrate attached thereto. Examples of other ligand-receptor pairs are well-known in the art and can similarly be used.

[0059] In some embodiments, the one or more peptides may be fused at its N-terminus or C-terminus to another suitable peptide. Two or more copies of a peptide of the invention may be joined to one another, alone or in combination with one or more additional peptides to increase the ability of the peptides to elicit an immune response. Combinations of fused and unfused peptides or polypeptides can be used.

[0060] In another aspect, the present disclosure provides a vaccine composition comprising an adjuvant and one or more peptides selected from Tables 1 or Table 9A or 9B or a peptide having at least 90% sequence similarity to one or more epitope peptides in Tables 1 or Table 9A or 9B. In another aspect, the present disclosure provides a vaccine composition comprising an adjuvant and one or more peptides that is a 16-mer or longer peptide of the M protein selected from Tables 1 or Table 9A or 9B or a peptide having at least 90% sequence similarity to one or more epitope peptides that is 16-mer or longer peptide in a Tables 1 or Table 9A or 9B. In another aspect, the present disclosure provides a vaccine composition comprising an adjuvant and one or more peptides that is a 18-mer or longer peptide of the M protein selected from Tables 1 or Table 9A or 9B or a peptide having at least 90% sequence similarity to one or more epitope peptides that is 18-mer or longer peptide in a Tables 1 or Table 9A or 9B. For example, the peptides may be a 16-mer, 17-mer, 18-mer, 19-mer, 20-mer, 21-mer, 22-mer, etc.

[0061] In another embodiment, the vaccine composition comprises an adjuvant and one or more peptide are selected from Table 2, one or more peptides that are 16 amino acids or longer or a peptide with at least 90% sequence similarity to a 16-mer or longer peptide of Table 2. In a further embodiment, the vaccine compositions comprise an adjuvant and one or more peptides selected from Tables 11A-11B or a peptide with at least 90% sequence similarity to a peptide in Tables 11A-11B, in some embodiments, the peptides are a 16-mer or longer of the peptides of Table 11A-11B, for example, a 16-mer, a 18-mer, a 20-mer, a 24-mer. For example, the peptides may be a 16-mer, 17-mer, 18-mer, 19-mer, 20-mer, 21-mer, 22-mer, etc.

[0062] In a further embodiment, the vaccine composition comprises an adjuvant and two or more peptides, three or more peptides, or four or more peptides selected from Tables 1 or Table 9A-9B. In some embodiments, the peptides selected have at least 90% sequence similarity to a peptide in Tables 1 or 9A-9B, alternatively at least 95% sequence similarity, alternatively at least 98% sequence similarity, alternatively at least 99% sequence similarity, or alternatively are the peptide sequences listed in Tables 1 or 9A-9B.

[0063] Table 2 provides the top ten peptides found to be highly specific and sensitive epitopes for discriminating between subjects who have and have not been infected with SARS-CoV-2. In some embodiments, the vaccine comprises two or more peptides, three or more peptides, four or more peptides selected from Table 2, or a peptide having at least 90% sequence similarity to a peptide in Table 2. In some embodiments, the peptides selected have at least 90% sequence similarity to a peptide in Table 2, alternatively at least 95% sequence similarity, alternatively at least 98% sequence similarity, alternatively at least 99% sequence similarity, or alternatively are the peptide sequences listed in Table 2.

[0064] Table 11A provides the top ten peptides that comprise highly specific and sensitive epitopes for discriminating between severely ill patients and patients with mild symptoms of COVID-19. Table 11B provides all peptides with a p value less than 0.01. Thus, in some embodiments, the vaccine compositions comprise an adjuvant and two or more peptides, three or more peptides, four or more peptides selected from Tables 11A-11B, or a peptide having at least 90% sequence similarity to a peptide in Tables 11A-11B. In some embodiments, the peptides selected have at least 90% sequence similarity to a peptide in Tables 11A-11B, alternatively at least 95% sequence similarity, alternatively at least 98% sequence similarity, alternatively at least 99% sequence similarity to the peptides listed in Tables 11A-11B, or alternatively are the peptide sequences listed in Tables 11A-11B. Again, it is contemplated that the peptides may be 16-mers or longer of the peptides found in Table 11A-11B, for example, the peptides may be a 16-mer, 17-mer, 18-mer, 19-mer, 20-mer, 21-mer, 22-mer, etc.

[0065] Tables 12A-12C provides the peptides that were found to be cross-reactive across two or more coronaviruses. Table 12A provides peptides within nucleocapsid proteins, Table 12B provides peptides within membrane proteins, and Table 12C provides peptides within surface proteins. Thus, in a further embodiment, the vaccine composition comprise an adjuvant and at least one peptide selected from Tables 12A-12C a homologous peptide to one of the peptides of Tables 12A-12C, or peptide with at least 90% sequence similarity to a peptide in Tables 12A-12C, and the peptide is cross-reactive with antibodies to at least two species of coronavirus. Without being bound by any theory, the use of one or more peptides from Tables 12A-12C in a vaccine composition may elicit an immune and antibody response that is cross-reactive against two or more different coronaviruses, making vaccines that comprise these peptides more broadly applicable. Again, it is contemplated that the peptides may be 16-mers or longer of the peptides found in Table 12A-12C, for example, the peptides may be a 16-mer, 17-mer, 18-mer, 19-mer, 20-mer, 21-mer, 22-mer, etc.

[0066] In another embodiment, the disclosure provides a method of detecting the presence of a coronavirus in a sample, the method comprising: contacting the sample with one or more peptide selected from Tables 12A-12C, a homologous protein to one or more peptide of Tables 12A-12C, or a peptide having at least 90% sequence similarity to a peptide in Tables 12A-12C; and detecting the binding of one or more antibodies from the sample to the one or more peptide by a detection agent, wherein the presence of the one or more antibodies within the sample indicates the presence of the coronavirus. In some embodiments, the coronavirus is selected from the group consisting of MERS, SARS-CoV, and a pre-emergent coronavirus. Again, it is contemplated that the peptides may be 16-mers or longer of the peptides found in Table 12A-12C, for example, the peptides may be a 16-mer, 17-mer, 18-mer, 19-mer, 20-mer, 21-mer, 22-mer, etc.

[0067] Suitable adjuvants are known in the art and include, but are not limited to, threonyl muramyl dipeptide (MDP) (Byars et al., 1987), Ribi adjuvant system components (Corixa Corp., Seattle, Wash.) such as the cell wall skeleton (CWS) component, Freund's complete adjuvants, Freund's incomplete adjuvants, bacterial lipopolysaccharide (LPS; e.g., from E. coli), or a combination thereof. A variety of other well-known adjuvants may also be used with the methods and vaccines of the invention, such as aluminum hydroxide, saponin, amorphous aluminum hydroxyphosphate sulfate (AAHS), aluminum hydroxide, aluminum phosphate, potassium aluminum sulfate (Alum), and combinations thereof. Cytokines (gamma.-IFN, GM-CSF, CSF, etc.), lymphokines, and interleukins (IL-1, IL-2, IL-3, IL-4, IL-5, IL-6, IL-7, IL-8. IL-9, IL-10, IL-11, IL-12, IL-13, IL-14, IL-15, IL-16, IL-17, 11-18, 11-19, IL-20, IL-21, and 11-22) have also been used as adjuvants and/or supplements within vaccine compositions and are contemplated to be within the scope of the present invention. For example, one or more different cytokines and/or lymphokines can be included in a composition comprising one or more peptides or a vaccine of the invention. In a preferred embodiment, the adjuvant is an aluminum salt, AS04, MF59, AS01B, CpG 1018, or another adjuvant that is considered to be safe for use in humans by the Centers for Disease Control and Prevention.

[0068] In some embodiments, the vaccine compositions comprise an adjuvant and (a) at least one membrane protein peptide from Tables 1 or a peptide having at least 90% sequence similarity to the at least one membrane protein peptide; and (b) at least one surface protein peptide from Tables 1 or a peptide having at least 90% sequence similarity to the at least one surface protein peptide. Not to be bound by any theory, but the combination of one membrane protein peptide and one surface protein peptide is believed to produce a more robust immune response.

[0069] In other embodiments, the vaccine compositions comprise an adjuvant and (a) at least one membrane protein peptide from Tables 1 or a peptide having at least 90% sequence similarity to the at least one membrane protein peptide; and (b) at least one nucleocapsid protein peptide from Tables 1 or a peptide having at least 90% sequence similarity to the at least one nucleocapsid protein peptide.

[0070] In further embodiments, the vaccine compositions comprise an adjuvant and (a) at least two membrane protein peptides from Tables 1 or a peptide having at least 90% sequence similarity to the at least two membrane protein peptides. In some embodiments, the vaccine composition may comprise a third peptide derived from a surface protein or a nucleocapsid protein from Tables 1 or a peptide having at least 90% sequence similarity to the at least one surface protein peptide or nucleocapsid protein peptide. Other suitable combinations of one or more peptides listed in Tables 1 are contemplated for use in the present vaccine compositions.

[0071] In some embodiments, the vaccine compositions comprise an adjuvant and (a) at least one membrane protein peptide from Tables 9A-9B or a peptide having at least 90% sequence similarity to the at least one membrane protein peptide; and (b) at least one surface protein peptide from Tables 9A-9B or a peptide having at least 90% sequence similarity to the at least one surface protein peptide. Not to be bound by any theory, but the combination of one membrane protein peptide and one surface protein peptide is believed to produce a more robust immune response. In other embodiments, the vaccine compositions comprise an adjuvant and (a) at least one membrane protein peptide from Tables 9A-9B or a peptide having at least 90% sequence similarity to the at least one membrane protein peptide; and (b) at least one nucleocapsid protein peptide from Tables 9A-9B or a peptide having at least 90% sequence similarity to the at least one nucleocapsid protein peptide. In further embodiments, the vaccine compositions comprise an adjuvant and (a) at least two membrane protein peptides from Tables 9A-9B or a peptide having at least 90% sequence similarity to the at least two membrane protein peptides. In some embodiments, the vaccine composition may comprise a third peptide derived from a surface protein or a nucleocapsid protein from Tables 9A-9B or a peptide having at least 90% sequence similarity to the at least one surface protein peptide or nucleocapsid protein peptide. Other suitable combinations of one or more peptides listed in Tables 9A-9B are contemplated for use in the present vaccine compositions.

[0072] The vaccine compositions described herein may further comprise a pharmaceutically acceptable excipient. The pharmaceutically acceptable excipient or carrier should be selected based on the selected route of administration and standard pharmaceutical practice. The composition may be formulated into dosage forms according to standard practices in the field of pharmaceutical preparations (see Alphonso Gennaro, ed., Remington's Pharmaceutical Sciences, 18th Ed., (1990) Mack Publishing Co., Easton, Pa). Suitable dosage forms may comprise, for example, solutions, parenteral solutions, or suspensions. In some embodiments, the composition comprises an isolated and purified peptide described herein combined with a suitable adjuvant for administration. In other embodiments, the composition comprises an isolated and purified vector comprising the nucleic acid sequence(s) encoding one or more peptides described herein.

[0073] The vaccine compositions as described herein can be used for eliciting an immune response in a subject against SARS-CoV-2. Suitably, the vaccine compositions are administered in a single dosage, or in conjunction with one or more booster dosages. A suitable method of administration can be readily determined by one skilled in the art.

[0074] The present disclosure also provides a polynucleotide construct comprising a heterologous promoter region and a nucleotide sequence encoding at least one peptide selected from Tables 1 or Table 9A-9B or a peptide having at least 90% sequence similarity to one or more peptides in Tables 1 or Table 9A-9B. In another embodiment, the polynucleotide encodes at least one peptide selected from Table 2 or a peptide with at least 90% sequence similarity to a peptide in Table 2. In another embodiment, the polynucleotide encodes at least one peptide selected from Tables IA-1B or a peptide with at least 90% sequence similarity to a peptide in Tables 11A-1B.

[0075] The terms “polynucleotide,” “polynucleotide sequence,” “oligonucleotide,” “nucleic acid,” and “nucleic acid sequence” are used interchangeably herein to refer to nucleotide sequences or fragments thereof. The polynucleotides of the present invention encode one or more peptides disclosed herein. In some embodiments, the polynucleotide may encode the one or more peptide and a tag. Suitable peptide tags are known in the art and described herein.

[0076] In some embodiments, the polynucleotide construct is a vector. Suitable vectors for use with the present invention comprise a promoter operably connected to a polynucleotide sequence encoding the one or more peptides described herein. The vectors may also comprise appropriate control sequences that allow for translational regulation in a host cell. In some embodiments, the vectors further comprise nucleic acid sequences encoding one or more agents or tags. In some embodiments, the vectors further comprise additional regulatory sequences, such as signal sequences.

[0077] As used herein, the term “vector” refers to a nucleic acid molecule capable of propagating another nucleic acid to which it is linked. The term includes the vector as a self-replicating nucleic acid structure as well as the vector incorporated into the genome of a host cell into which it has been introduced. Certain vectors are capable of directing the expression of nucleic acids to which they are operatively linked. Such vectors are referred to herein as “expression vectors” (or simply, “vectors”). The term vector encompasses “plasmids”, the most commonly used form of vector. Plasmids are circular double-stranded DNA loops into which additional DNA segments (e.g., those encoding one or more peptides) may be ligated. However, other forms of expression vectors, such as viral vectors (e.g., replication defective retroviruses, adenoviruses and adeno-associated viruses), may also be used with the present invention.

[0078] In some embodiments, the vectors of the present invention further comprise heterologous backbone sequence. As used herein, “heterologous nucleic acid sequence” refers to a non-human nucleic acid sequence, for example, a bacterial, viral, or other non-human nucleic acid sequence that is not naturally found in a human. Heterologous backbone sequences may be necessary for propagation of the vector and/or expression of the encoded peptide. Many commonly used expression vectors and plasmids contain non-human nucleic acid sequences, including, for example, CMV promoters.

[0079] Protein and nucleic acid sequence identities are evaluated using the Basic Local Alignment Search Tool (“BLAST”) which is well known in the art (Karlin and Altschul, 1990, Proc. Natl. Acad Sci. USA 87: 2267-2268; Altschul et al., 1997, Nucl. Acids Res. 25: 3389-3402). The BLAST programs identify homologous sequences by identifying similar segments, which are referred to herein as “high-scoring segment pairs,” between a query amino or nucleic acid sequence and a test sequence which is preferably obtained from a protein or nucleic acid sequence database. Preferably, the statistical significance of a high-scoring segment pair is evaluated using the statistical significance formula (Karlin and Altschul, 1990), the disclosure of which is incorporated by reference in its entirety. The BLAST programs can be used with the default parameters or with modified parameters provided by the user.

[0080] “Percentage of sequence identity” or “percent similarity” is determined by comparing two optimally aligned sequences over a comparison window, wherein the portion of the polynucleotide or peptide sequence in the comparison window may comprise additions or deletions (i.e., gaps) as compared to the reference sequence (which does not comprise additions or deletions) for optimal alignment of the two sequences. The percentage is calculated by determining the number of positions at which the identical nucleic acid base or amino acid residue occurs in both sequences to yield the number of matched positions, dividing the number of matched positions by the total number of positions in the window of comparison and multiplying the result by 100 to yield the percentage of sequence identity.

[0081] “Substantial identity” or “similar identity” of amino acid sequences for purposes of this invention normally means polypeptide sequence identity of at least 90%. Preferred percent identity of polypeptides can be any integer from 90% to 100%. More preferred embodiments include at least 90%, 91%, 92%, 93%, 94%, 95%, 96%, 97%, 98%, 98.7%, or 99%.

[0082] In another aspect, the present disclosure provides host cells comprising the polynucleotide constructs or vectors described herein. Any host cell that allows for expression of the peptides encoded by the polynucleotide constructs or vectors may be used with the present invention. For example, common host cells include bacteria (e.g., E. coli, B. subtilis), yeast (e.g., S. cerevisiae), phage or eukaryotic cell lines. For example, phage immunoprecipitation sequencing (PhIP-seq). Advantageously, insect or mammalian cell lines may be used to provide human-like splicing of mRNA. However, those of skill in the art are aware that many expression systems and cell lines may be used to express the peptides of the present invention, including many that are commercially available.

[0083] In a further aspect, the disclosure provides a vaccine composition comprising the polynucleotide construct or vector encoding the one or more peptides described herein. These DNA vaccine compositions may further comprise an adjuvant, as known in the art.

[0084] The present invention further provides methods of eliciting an immune response to SARS-CoV-2 in a subject. The methods comprise administering an effective amount of a vaccine composition disclosed herein to the subject to elicit an immune response. Suitably, the elicited immune response is a B-cell antibody.

[0085] In another embodiment, embodiment, the peptides described herein can be used in methods to produce antibodies that are specific to the peptides in a subject. In some embodiments, the subject is an animal that can produce an antibody. The method comprises administering (preferably by injection) the epitopes of the present invention (e.g., peptides in Table 1, 2, 6, and 9-12). Suitably, the peptides are administered with an adjuvant or immunostimulatory molecules that stimulate the production of antibodies within the subject. Suitable adjuvants are known in the art some of which are described herein above. Methods of detecting antibodies are known in the art (e.g., ELISA, etc).

[0086] The antibodies may be monoclonal antibodies, humanized antibodies or chimeric antibodies. Methods of producing antibodies are known in the art. For example, methods of making monoclonal antibodies are readily understood in the art. Further, monoclonal antibodies isolated may be able to be made into humanized and chimeric antibodies with methods known it the art. The present invention provides a method of generating an antibody that specifically binds to a peptide from SARS-CoV-2 described herein or within the Tables described herein the method comprising: a) introducing a peptide immunogen to a mammal in an amount sufficient to produce an antibody to said peptide; b) recovering the antibody from the mammal; c) purifying said antibody. In further embodiments, monoclonal antibodies can be made from the mammal inoculated with the peptide by methods known in the art and making hybridomas that specifically produce a specific antibody. Hybridomas can be obtained by immunizing a mammal, such as a mouse or a rat with the peptides described herein, cell fusion of the immunized animals spleen cells to myeloma cells of a mammal, such as a mouse or a rat in accordance with the method originally outlined by Kohler and Milstein [see Nature, 256, 495 (1975)], and then culturing the fused cells in a selection medium. The hybridomas produced can be screened for antibodies that specifically bind the peptide used as an immunogen.

[0087] The term “antibody” is used in the broadest sense and specifically covers monoclonal antibodies, antibody compositions with polyepitopic specificity, bispecific antibodies, diabodies, and single-chain molecules, as well as antibody fragments (e.g., Fab, F(ab′)2, and Fv), so long as they exhibit the desired biological activity. As used herein “immunoglobulin” or “antibody” includes all subclasses of alpha, delta, epsilon, gamma, and mu and also refers to any natural (e.g., IgA and IgM) or synthetic multimers of the four-chain immunoglobulin structure. Antibodies non-covalently, specifically, and reversibly bind an antigen. The term “monoclonal antibody” as used herein refers to an antibody obtained from a population of substantially homogeneous antibodies, i.e., the individual antibodies comprising the population are identical except for possible naturally occurring mutations that can be present in minor amounts. For example, monoclonal antibodies may be produced by a single clone of antibody-producing cells. Unlike polyclonal antibodies, monoclonal antibodies are monospecific (e.g., specific for a single epitope of a single antigen). The modifier “monoclonal” indicates the character of the antibody as being obtained from a substantially homogeneous population of antibodies, and is not to be construed as requiring production of the antibody by any particular method. For example, the monoclonal antibodies to be used in accordance with the present invention can be made by the hybridoma method first described by Kohler et al., Nature, 256: 495, 1975, or can be made by recombinant DNA methods. The “monoclonal antibodies” can also be isolated from phage antibody libraries using the techniques known in the art, for example, as described in Marks et al., J. MoI. Biol, 222: 581-597, 1991. As used herein “chimerized” refers to an immunoglobulin, wherein the heavy and light chain variable regions are not of human origin and wherein the constant regions of the heavy and light chains are of human origin. “Humanized” refers to an immunoglobulin such as an antibody, wherein the amino acids directly involved in antigen binding, the complementarity determining regions (CDR), of the heavy and light chains are not of human origin, while the rest of the immunoglobulin molecule, the framework regions of the variable heavy and light chains and the constant regions of the heavy and light chains, are of human origin.

[0088] The terms “effective amount” or “therapeutically effective amount” refer to an amount sufficient to effect beneficial or desirable biological and/or clinical results. For example, therapeutically effective amounts of the peptides of the present invention may be combined with a pharmaceutically acceptable carrier and adjuvant to form a vaccine composition. The vaccine composition can be administered in any of the art-recognized modes. The doses, methods of administration, and suitable pharmaceutically acceptable carriers, diluents, and excipients for use with such methods can readily be determined by a skilled artisan, but will depend on the particular circumstances at hand.

[0089] Appropriate dosages may be determined, for example, by extrapolation from animal studies or in clinical trials taking into account body weight of the patient, absorption rate, half-life, disease severity and the like. Suitable booster schedules may be determined by a skilled artisan. For example, the compositions may be given once, twice or yearly, or may be given in a series of booster schedule, for example, once a month, every other month, every 4 months, every 6 months, once a year, once every two years, and any range of time in between.

[0090] As used herein, “subject” or “patient” refers to both mammals and non-mammals. “Mammals” include any member of the class Mammalia, such as humans, non-human primates (e.g., chimpanzees, other apes and monkey species), farm animals (e.g., cattle, horses, sheep, goats, and swine), domestic animals (e.g., rabbits, dogs, and cats), and laboratory animals (e.g., rats, mice, and guinea pigs). The term “subject” does not denote a particular age or sex. In one embodiment, the subject is a human.

[0091] As used herein, the terms “administering” and “administration” refer to any method of providing a pharmaceutical preparation or composition to a subject comprising the one or more peptides described herein. Such methods are well known to those skilled in the art and include, but are not limited to, transdermal administration, administration by inhalation, nasal administration, and parenteral administration, including injectable such as intramuscular administration, intradermal administration, and subcutaneous administration.

[0092] To aid in administration, vaccines may be mixed with a suitable carrier or diluent such as water, oil (e.g., a vegetable oil), ethanol, saline solution (e.g., phosphate buffer saline or saline), aqueous dextrose (glucose) and related sugar solutions, glycerol, or a glycol such as propylene glycol or polyethylene glycol. Stabilizing agents, antioxidant agents and preservatives may also be added. Suitable antioxidant agents include sulfite, ascorbic acid, citric acid and its salts, and sodium EDTA. Suitable preservatives include benzalkonium chloride, methyl- or propyl-paraben, and chlorbutanol. The composition for parenteral administration may take the form of an aqueous or nonaqueous solution, dispersion, suspension or emulsion.

### Diagnostic Immunoassay, Kits and Methods of Use

[0093] The present disclosure provides diagnostic kits, assays and methods that are able to detect the presence of antibodies that a subject has produced in response to SARS-CoV-2 infection, allowing for detection of a past SARS-CoV-2 infection in a subject or methods of distinguishing from a vaccinated individual, an individual that has had SARS-CoV-2 infection or who has remained uninfected and unvaccinated. Specifically, in one embodiment, the kits, assays and methods may be used to identify people who have an active infection and have mounted an immune response to the virus or to identify people who have been infected (knowingly or unknowingly) and have recovered, including those who were asymptomatic. The assays and methods are both sensitive and specific to SARS-CoV-2 infection. In another embodiment, the kits, assays and methods can be used to detect between a vaccinated individual, an individual that had or has an active SARS-CoV-2 infection or an individual who has remained uninfected and unvaccinated.

[0094] In one embodiment, the assay and methods provided comprise one or more peptides to SARS-Cov-2 as described herein (e.g., Table 1 or Table 2, or in Tables 6, 9-12), preferably wherein the peptides are linked or adhered to a solid or semi-solid support. A secondary agent (e.g., detection agent) is used to detect antibodies from the sample that specifically bind to the peptides in the assay. For example, the detection agent may be an anti-IgG antibody that specifically binds to antibody constant region (e.g., human anti-IgG agent). In another embodiment, antibodies produced from the peptides described herein can be used to detect active infection, wherein the antibodies can bind to the virus, for example using lateral flow assay, in a sample from a subject. In other words, instead of the peptides described herein used as the capture agent, the capture agent would be antibodies that have been developed that specifically bind to a peptide described herein.

[0095] The term “sensitivity” or “sensitive” refers to the ability of an assay or method to identify samples containing antibodies to SARS-CoV-2 (true positive rate), and the “specificity,” refers to their ability to identify samples without antibodies to SARS-CoV-2 (true negative rate). The sensitivity of the assays and methods was determined based on their ability to detect antibodies in blood samples from patients who have been confirmed to have COVID-19 using a nucleic acid amplification test (i.e., PCR).

[0096] In one aspect, the present disclosure provides methods of detecting the presence of antibodies generated against SARS-CoV-2 in a sample. The methods comprise contacting the sample with one or more peptides selected from Tables 1 or Table 1 or a peptide having at least 90% sequence similarity to a peptide in Tables 1 or Table 2; and detecting the binding of one or more antibodies from the sample to the one or more peptide by a detection agent. In these methods, the presence of the one or more antibodies within the sample indicates the presence of anti-SARS-CoV-2 antibodies. In some embodiments, the contacting step uses two or more peptides, three or more peptides, four or more peptides selected from Tables 1 or Table 2 or a peptide having at least 90% sequence similarity to a peptide in Tables 1 or Table 2. In some embodiments, the peptides selected have at least 90% sequence similarity to a peptide in Tables 1 or Table 2, alternatively at least 95% sequence similarity, alternatively at least 98% sequence similarity, alternatively at least 99% sequence similarity to the peptides listed in Tables 1 or Table 2, or alternatively are the peptide sequences listed in Tables 1 or Table 2. One skilled in the art would understand that peptides comprising slight variations relative to the disclosed peptide sequences may still provide sufficient binding and specificity as to be used with the methods of the present invention. In some embodiments, the peptides may further comprise a tag, e.g., to facilitate purification, detection, or adhesion to a solid substrate for practice of the present invention.

[0097] In one embodiment, the methods comprise contacting the sample with one or more peptides selected from Table 2 or a peptide having at least 90% sequence similarity to a peptide in Table 2; and detecting the binding of one or more antibodies from the sample to the one or more peptide by a detection agent, wherein the presence of the one or more antibodies within the sample indicates current or past infection with SARS-CoV-2. Table 2 provides the top ten peptides found to be highly specific and sensitive to SARS-CoV-2 infection. In some embodiments, the contacting step uses two or more peptides, three or more peptides, four or more peptides selected from Table 2 or a peptide having at least 90% sequence similarity to a peptide in Table 2. In some embodiments, the peptides selected have at least 90% sequence similarity to a peptide in Table 2, alternatively at least 95% sequence similarity, alternatively at least 98% sequence similarity, alternatively at least 99% sequence similarity to the peptides listed in Table 2, or alternatively are the peptide sequences listed in Table 2.

[0098] In one aspect, the present disclosure provides methods of detecting the presence of antibodies generated against SARS-CoV-2 in a sample. The methods comprise contacting the sample with one or more peptides selected from Tables 9A-9B or a peptide having at least 90% sequence similarity to a peptide in Tables 9A-9B; and detecting the binding of one or more antibodies from the sample to the one or more peptide by a detection agent. In these methods, the presence of the one or more antibodies within the sample indicates the presence of SARS-CoV-2. In some embodiments, the contacting step uses two or more peptides, three or more peptides, four or more peptides selected from Tables 9A-9B or a peptide having at least 90% sequence similarity to a peptide in Tables 9A-9B. In some embodiments, the peptides selected have at least 90% sequence similarity to a peptide in Tables 9A-9B, alternatively at least 95% sequence similarity, alternatively at least 98% sequence similarity, alternatively at least 99% sequence similarity to the peptides listed in Tables 9A-9B, or alternatively are the peptide sequences listed in Tables 9A-9B. One skilled in the art would understand that peptides comprising slight variations relative to the disclosed peptide sequences may still provide sufficient binding and specificity as to be used with the methods of the present invention. In some embodiments, the peptides may further comprise a tag, e.g., to facilitate purification, detection, or adhesion to a solid substrate for practice of the present invention.

[0099] In one embodiment, the methods comprise contacting the sample with one or more peptides selected from Table 10 or a peptide having at least 90% sequence similarity to a peptide in Table 10; and detecting the binding of one or more antibodies from the sample to the one or more peptide by a detection agent, wherein the presence of the one or more antibodies within the sample indicates current or past infection with SARS-CoV-2. Table 10 provides the top ten peptides found to be highly specific and sensitive to SARS-CoV-2 infection. In some embodiments, the contacting step uses two or more peptides, three or more peptides, four or more peptides selected from Table 10 or a peptide having at least 90% sequence similarity to a peptide in Table 10. In some embodiments, the peptides selected have at least 90% sequence similarity to a peptide in Table 10, alternatively at least 95% sequence similarity, alternatively at least 98% sequence similarity, alternatively at least 99% sequence similarity to the peptides listed in Table 10, or alternatively are the peptide sequences listed in Table 10.

[0100] In another embodiment, the methods comprise contacting the sample with one or more peptides selected from Tables 11A-11B or a peptide having at least 90% sequence similarity to a peptide in Tables 11A-11B; and detecting the binding of one or more antibodies from the sample to the one or more peptide by a detection agent, wherein the presence of the one or more antibodies within the sample indicates current or past infection with SARS-CoV-2. Table 11A provides the top ten peptides found to be highly specific and sensitive to antibodies found in severely ill patients as opposed to patients with mild symptoms of COVID-19, while Table 11B provides peptides with a p value less than 0.01. In some embodiments, the contacting step uses two or more peptides, three or more peptides, four or more peptides selected from Tables 11A-11B or a peptide having at least 90% sequence similarity to a peptide in Tables 11A-11B. In some embodiments, the peptides selected have at least 90% sequence similarity to a peptide in Tables 11A-11B, alternatively at least 95% sequence similarity, alternatively at least 98% sequence similarity, alternatively at least 99% sequence similarity to the peptides listed in Tables 11A-11B, or alternatively are the peptide sequences listed in Tables 11A-11B.

[0101] In a preferred embodiment, the contacting step comprises at least one membrane protein peptide selected from Tables 1-3, 6, 9-11 or a membrane protein peptide having at least 90% sequence similarity to the peptide in Tables 1-3, 6, 9-11. In some embodiments, the at least one peptide comprises at least one membrane protein peptide and at least one surface protein peptide, wherein the peptides are listed in Tables 1-3, 6, 9-11. In another embodiment, the at least one peptide comprises at least one membrane protein peptide and at least one nucleocapsid protein peptide found in Tables 1-3, 6,9-11.

[0102] The method of contacting the sample with the one or more peptides of the present invention may be carried out by a number of different methods known to those skilled in the art. For example, in one embodiment, the peptides of the present invention may be attached to a solid or semi-solid support. In another embodiment, the one or more peptides may be incorporated into a lateral flow device (e.g., Abbott's BinaxNOW).

[0103] In another embodiment, the method of detecting the presence of SARS-CoV-2 virus in a sample from a subject are provided. The method comprises contacting the sample with an antibody that binds to one or more peptides or epitopes described herein, and detecting the presence of the sample peptide(s) bound to the antibody detects SARS-CoV-2 virus in the sample. The detection of bound peptide or epitopes signifies that the sample has virus proteins within it, and therefore the subject has a SARS-CoV-2 infection.

[0104] In another embodiment, the method of contacting the sample with an antibody that binds to one or more epitopes of the present invention may be carried out by a number of different methods known to those skilled in the art. For example, in one embodiment, the antibodies of the present invention may be attached to a solid or semi-solid support. In another embodiment, the one or more peptides may be incorporated into a lateral flow device (e.g., Abbott's BinaxNOW).

[0105] In some embodiments, kits or assays comprising one or more of the peptides described herein attached or immobilized to a solid or semi-solid support are contemplated herein. Suitable peptides may be any described herein, for example, those described in Table 1, Table 2, Table 3, Table 6, or any one of Tables 9-12. In one embodiment, a kit comprising a lateral flow immunoassay device comprising one or more of the peptides described herein is contemplated. Different kits or assays comprising different peptides are contemplated depending on the readout that one desires. For example, different peptide may be used for detecting if a subject had a past infection or is vaccinated vs the peptide used to test to distinguish and stratify disease severity during testing and diagnosis.

[0106] Methods of attaching or immobilizing peptides on a solid or semi-solid support are known in the art. The attachment can be covalent or non-covalent, and can be facilitated by a moiety associated with the peptide that enables covalent or non-covalent binding, such as a moiety that has a high affinity to a component attached to the carrier, support, or surface. Suitable solid supports include, but are not limited to a bead or plurality of beads (e.g., a colloidal particle, a metallic nanomaterial, a nanoparticle, a nanoplate, a nanoshell, a nanorod, a latex bead, polystyrene, polycarbonate, polyacrylate, PVDF, or PMMA, etc.), a flow path in a lateral flow immunoassay device (e.g., a porous membrane), a flow path in an analytical or centrifugal rotor, a blot (western blot, a slot blot, or dot blot), a tube or a well (e.g., in a plate suitable for an ELISA assay), or solid substrate (plastic, glass, etc.). In some embodiments, the solid support comprises metal, glass, a cellulose-based material (e.g., nitrocellulose), or a polymer (e.g., polystyrene, polyethylene, polypropylene, polyester, nylon, polysulfone, etc). The one or more peptides can be attached to or immobilized on the substrate either prior to or after the addition of a sample during an immunoassay. In one preferred embodiment, the peptides comprise biotin tags and are immobilized to wells that are coated with avidin.

[0107] In certain embodiments, the substrate is a bead or plurality of beads, such as a colloidal particle (e.g., a colloidal nanoparticle made from gold, silver, platinum, copper, cadmium, metal composites, other soft metals, core-shell structure particles, or hollow gold nanospheres) or other type of particle (e.g., a magnetic bead or a particle or nanoparticle comprising silica, latex, polystyrene, polycarbonate, polyacrylate, PVDF, or PMMA). Such particles can comprise a label (e.g., a colorimetric, chemiluminescent, quantum dot or fluorescent label) and can be useful for visualizing the location of the peptides during immunoassays. In certain embodiments, a terminal cysteine of a peptide of the invention is used to bind the peptide directly to a metallic nanomaterial or nanostructure.

[0108] The term “detection agent,” as used herein, refers to an agent that is able to detect the binding of antibodies from the sample to the peptides of the present invention. For example, one suitable detection agent is a secondary antibody or fragment thereof, preferably an anti-human immunoglobulin antibody or fragment thereof that is capable of binding any human antibodies that specifically bind to the SARS-CoV-2 peptides described herein. The antibodies used with the present invention may be anti-human IgG, anti-human IgM, or anti-human IgA antibodies. For example, typical anti-human IgG antibodies bind to the constant regions of the antibody, allowing for detection of any bound human antibodies. Alternatively, to perform seropositivity testing in primates, an anti-non-human primate (NHP) immunoglobulin antibody may be used as a detection agent. Such antibodies are known and readily available in the art. In an alternative embodiment, protein A or protein G are used to detect any bound antibodies.

[0109] Suitably, in some embodiments, the detection agent (e.g., secondary antibody or fragments thereof) comprises a detectable tag. The detectable tag facilitates detection of the binding of antibodies within the sample to the peptides described herein. Suitable detectable tags are known in the art, and include, but are not limited to, for example, a protein tag, an enzymatic tag, a biotin tag, a chemiluminescent tag, and a fluorescent tag. Some examples of tags include biotin, conjugated gold, carbon, or colored latex nanoparticles, fluorescent proteins, magnetic beads, and colored polystyrene beads, among others which are known and readily available in the art.

[0110] In one embodiment, the assay and methods provided comprise one or more peptides to SARS-Cov-2 as described herein (e.g., Table 1 or Table 2, or in Tables 6, 9-12), preferably wherein the peptides are linked or adhered to a solid or semi-solid support. A secondary agent (e.g., detection agent) is used to detect antibodies from the sample that specifically bind to the peptides in the assay. For example, the detection agent may be an anti-IgG antibody that specifically binds to antibody constant region (e.g., human anti-IgG agent). For example, in one embodiment the immunoassay is an immunochromatographic membrane assay.

[0111] The sample for use in the assay includes biological samples obtained from a subject suspected of having or suspected to have a current or past infection with SARS-CoV-2. Suitable biological samples include, but are not limited to, for example, blood sample, saliva sample, sputum sample, stool sample, cerebrospinal fluid sample, bronchiolar lavage, nasopharyngeal lavage, nasopharyngeal swab, serum sample, or plasma sample. In some embodiments, the sample is convalescent plasma, which can be further used for treatment in a subject in need thereof.

[0112] Suitably, the samples are obtained from the subject who is suspected of having had, been exposed to, or having recovered from SARS-CoV-2 infection. Suitably, the sample may have been collected from a subject at least 3-5 days after onset of symptoms, alternatively at least 7 days after onset of symptoms, alternatively at least 12 days after onset of symptoms, alternatively at least 14 days after onset of symptoms, alternatively at least 28 days after onset of symptoms, alternatively at least 35 days after onset of symptoms, or may have been collected at any time between or after said range (e.g., 7 days, 8, 9, 10, 11, 12, 13, 14, 15, 16, 17, 18, 19, 20, 21, 22, 23, 24, 25, 26, 27, 28, 29, 30, 31, 32, 33, 34, 35, 36, 37, 38, 39, 40, etc.). Alternatively, the sample may be taken from a subject that is unaware if they have had symptoms of COVID-19 or have been exposed to SARS-CoV-2.

[0113] In any of the methods described herein, the detecting step may comprise performing an ELISA assay. Alternatively, the detecting step may comprise performing a lateral flow immunoassay. In some embodiments, the methods may be performed using specific assay devices, e.g., high throughput devices, such as chemiluminescent microparticle immunoassay (CMIA) (e.g., Abbott's Alinity Immunoassay Systems or Architect immunoassay systems) or a chemiluminescent immunoassay (CLIA) (e.g., Promega's Lumit™ Immunoassay), which are known in the art.

[0114] Further, the peptides that showed statistically significant differences in abundance between severely ill hospitalized patients and the mildly ill, non-hospitalized patients (found in Tables 11A-11B) may be useful to distinguish and stratify disease severity during testing and diagnosis.

[0115] In a further embodiment, the peptides can be used to distinguish a subject having or having had a SARS-CoV-2 infection, having been vaccinated or being uninfected and unvaccinated. In this embodiment, at least one peptide to the membrane protein as described herein is used, for example, SEQ ID NO:1. Further, in some embodiments, at least one peptide to the spike protein is used as described herein. A subject having only been vaccinated will only have antibodies that bind to the spike protein, while a person who has had a natural SARS-CoV-2 infection will have antibodies to the membrane protein and spike protein, and therefore, subjects will be able to be distinguished from one another.

[0116] The methods, kits and assays described herein may also be used to detect if an adequate immune response has been mounted after vaccination, and the results can be used for diagnostic purposes in deciding if a booster vaccine may be necessary to mount an adequate immune response. The methods, kits and assays described herein could be used for this purpose.

[0117] In a further embodiment, the methods, kits and assays described herein may be used to screen convalescent serum for suitable antibodies for use in therapeutic treatment of a subject having SARS-CoV-2. Suitably, the method would detect one or more of the peptides described in Table 1 or Table 2, preferably in Table 2, showing that the serum has adequate antibodies to SARS-CoV-2.

### Immunoassay

[0118] In another embodiment, the present disclosure provides an immunoassay for detecting antibodies to SARS-CoV-2 in a biological sample. The assay comprises a capture agent comprising one or more peptides selected from Tables 1-3, 9-12 or a peptide with at least 90% similarity to an epitope peptide in Tables 1-3, 9-11 (alternatively at least 95% similarity), and a detection agent capable of binding to the one or more antibodies that bind to the capture agent. In some embodiments, the capture agent is one or more peptides selected from Table 2.

[0119] In some embodiments, the one or more peptides are attached to a solid or semi-solid support. In other embodiments, the one or more peptides are within a lateral flow device or an immunochromatographic membrane assay.

[0120] Suitable detection agents are described herein and include, for example, an anti-human antibody or fragment thereof that binds to human IgG, IgM, or IgA. The detection agent may have a detectable tag. In other embodiments, the detection agent is tagless and uses photons. Suitable detectable tags are described herein and include, for example, an enzymatic tag, a biotin tag, a chemiluminescent tag and a fluorescent tag.

[0121] The capture agent may comprise one or more peptides, two or more peptides, three or more peptides that would ensure accurate, specific, and selective detection of SARS-CoV-2. In some embodiments, the capture agent comprises at least one membrane protein-specific peptide selected from Tables 1-3, 6, 9-11 or a peptide having at least 90% sequence similarity to the membrane-specific epitope in Tables 9A-1B. One suitable detection agent is a secondary antibody or fragment thereof, preferably an anti-human IgG, IgM, or IgA antibody or fragment thereof. In another embodiment, the capture agent may comprise one or more peptides of Table 12, or a peptide having at least 90% sequence similarity to a peptide of Table 12, and may be used as an immunoassay to test for one or more coronaviruses (e.g., a pan coronavirus test).

[0122] In some embodiments, the immunoassay is a lateral flow detection system. Lateral flow detection systems are known and understood in the art, for example, as described in Koczula K M, Gallotta A. Lateral flow assays. Essays Biochem. 2016; 60(1):111-120. doi:10.1042/EBC20150012, the contents of which are incorporated by reference in its entirety. In brief, lateral flow device is a simple device that contains paths within the device through different zones in which the sample will flow by capillary action and can bind to the one or more peptides described herein, the detection agent and provide a readable signal. For example, the lateral flow strip may comprise an adsorbent sample pad in which to intake the sample, conjugate release pad, and a detection zone. The read-out may be represented by a line appearing at different intensities that can be assessed by eye or a dedicated reader. Lateral flow devices can contain multiple array channels if more than one antibody is to be assayed.

[0123] In some embodiments, the immunoassay is a lateral flow detection system that contains paths within the device through different zones in which the sample will flow by capillary action and can bind to the one or more antibodies that can bind to one or more of the peptides described herein, the detection agent and provide a readable signal. This immunoassay could be used to detect current or new infections. For example, a lateral flow device similar to the above using antibodies that specifically bind the peptides described herein is contemplated (e.g., peptides of Tables 1, 2, 6, 9-12) for the detection of SARS-CoV-2 peptides or proteins within a sample, signifying a virally infected subject.

[0124] For example, a suitable lateral flow immunoassay format comprises antibodies to human immunoglobulins labeled with a signal generator or detection agent (e.g., colloidal gold) that is dried and placed on a glass fiber pad (sample application pad or conjugate pad). The one or more peptides of the present invention are immobilized on a membrane, such as nitrocellulose or a PVDF (polyvinylidene fluoride) membrane (e.g., an Immobilon™ membrane). A sample (e.g., blood, serum, etc.) is applied to the sample application pad (or flows through the conjugate pad). The sample dissolves the labeled detection agent, which then binds to all antibodies in the sample. The resulting detection agent-antibody complexes are then transported into the next membrane (PVDF or nitrocellulose), which contains the diagnostic peptide, by capillary action. If antibodies against the one or more peptides are present in the sample, they bind the one or more peptides striped on the membrane, thereby generating a signal (e.g., a band that can be seen or visualized). An additional antibody specific to the labeled antibody or a second labeled antibody can be used to produce a control signal.

[0125] In an alternative example, the lateral flow immunoassay comprises the one or more peptides being conjugated to a detectable tag (e.g., biotin) and complexed with labeled ligand receptor (e.g., streptavidin-colloidal gold). The tagged peptide complexes can be placed on the sample application pad or conjugate pad. Anti-human IgG/IgM antibodies or other peptides of the invention are immobilized on a membrane, such as nitrocellulose or PVDF, or Porex® membrane at a test site (e.g., a test line). When sample is added to the sample application pad, antibodies in the sample react with the tagged peptide complexes such that antibodies that bind to peptides of the invention become indirectly labeled. The antibodies in the sample are then transported into the next membrane (PVDF, Porex® membrane, or nitrocellulose), which contains the diagnostic peptide, by capillary action and bind to the immobilized anti-human IgG/IgM/IgA antibodies (or protein A, protein G, protein A/G fusion proteins, protein L, or combinations thereof) or immobilized peptides of the invention. If any of the sample antibodies are bound to the labeled peptides of the invention, the label associated with the peptides can be seen or visualized at the test site.

[0126] Other lateral flow device designs are understood in the art and contemplated as part of the present invention.

[0127] In other embodiments, the immunoassay is an enzyme-linked immunosorbent assay (ELISA). ELISA is a plate-based assay technique wherein the one or more peptides is immobilized on a solid surface (microplate), exposed to the sample for binding of antibodies within the sample, and then incubated with a detection agent, i.e., anti-human secondary antibody that is typically linked to a reporter enzyme. Detection is accomplished by measuring the activity of the reporter enzyme via incubation with the appropriate substrate to produce a measurable product. In one embodiment, the one or more peptides of the invention is immobilized on a surface, such as a ninety-six-well ELISA plate or equivalent solid phase that is coated with streptavidin or an equivalent biotin-binding compound, such as avidin or neutravidin, at an optimal concentration in an alkaline coating buffer and incubated at 4° C. overnight. After a suitable number of washes with standard washing buffers, an optimal concentration of a biotinylated form of the one or more peptides is applied to each well. A sample is then added, and incubated for a sufficient length of time to allow specific binding to occur. The well(s) is washed to remove unbound protein and then incubated with an appropriate anti-immunoglobulin antibody (e.g., for human subjects, an anti-human immunoglobulin from another animal, such as dog, mouse, rat, pig, cow, etc.) that is labeled with a detection agent. In one embodiment, the detection agent is an enzyme, for example, horseradish peroxidase (HRP), beta-galactosidase, alkaline phosphatase (ALP), glucose oxidase, O-GAL, etc. Sufficient time is allowed for specific binding to occur, then the well is washed again to remove unbound conjugate, and a suitable substrate for the enzyme is added. Color is allowed to develop and the optical density of the contents of the well is determined visually or instrumentally (measured at an appropriate wave length). Conditions for performing ELISA assays are well-known in the art. Other ELISA designs are well understood by one skilled in the art and contemplated within the present invention.

[0128] In further embodiments, the immunoassay is a chemiluminescent microparticle immune assay (CMIA), a chemiluminescent immunoassay (CLIA), or another high throughput assay for detecting an antibody in a sample. These high throughput assays are known and understood in the art.

[0129] The present disclosure also contemplates the use of the immunoassay described herein for the detection of SARS-CoV-2 in a biological sample.

[0130] As used herein, the term “specifically binds” or “specific binding” refers to the specificity of an antibody such that it preferentially binds to a defined target (e.g., peptides of the present disclosure). An antibody “specifically binds” to a target if it binds with greater affinity, avidity, more readily, and/or with greater duration than it binds to other substances. For example, an antibody that specifically binds to a target may bind to the target with at least about 10%, at least about 20%, at least about 30%, at least about 50%, at least about 60%, at least about 70%, at least about 80%, at least about 90%, or more, greater affinity as compared to binding to other substances; or with at least about two-fold, at least about five-fold, at least about ten-fold, or more of the affinity for binding to other substances. Recognition by an antibody of a particular target in the presence of other potential targets is one characteristic of such binding. Specific binding of the presently contemplated antibodies to particular targets is measured through known methods utilizing the tools provided herein.

### Kits

[0131] The present disclosure further provides kits comprising the immunoassay described herein or kits for carrying out the methods described herein. In one embodiment, the kit comprises the immunoassay described herein. In another embodiment, the present disclosure provides kits comprising one or more peptides of the present invention, and may further include a detection agent able to recognize human antibodies that may bind to the one or more peptides. In one embodiment, the detection agent is an anti-human IgG, IgM, or IgA antibody conjugated to a detectable label. In some embodiments, the detectable label is as described herein and may include, for example, an enzyme, a metallic nanomaterial, a fluorophore, or colored latex particle.

[0132] In some embodiments, the peptides in the kit are attached to or immobilized on a solid or semi-solid support. In certain embodiments, the solid support is a bead (e.g., a colloidal particle, a metallic nanomaterial such as nanoparticle, nanoplate, nanoshell, a latex bead, etc.), a flow path in a lateral flow immunoassay device, a flow path in an analytical device, a tube or a well (e.g., in a plate or microtiter plate).

[0133] In some embodiments, the kits further comprise a population of beads or a plate (e.g., a plate suitable for an ELISA assay). In other embodiments, the kits further comprise a device, such as a lateral flow immunoassay device, a western blot, a dot blot, a slot blot, an electrochemical sensor, an optical sensor, or an opto-electronic sensor. In certain embodiments, the population of beads, the plate, or the device is useful for performing an immunoassay. For example, in certain embodiments, the population of beads, the plate, or the device is useful for detecting formation of an antibody-peptide complex comprising an antibody from a sample and a peptide of the invention. In certain embodiments, a peptide or population of different peptides of the invention is attached to or immobilized on the beads, the plate, or the device.

[0134] The kits of the invention may further comprise a set of instructions indicating, for example, how to use the one or more peptides of the invention to detect antibodies to SARS-CoV-2.

[0135] It should be apparent to those skilled in the art that many additional modifications beside those already described are possible without departing from the inventive concepts. In interpreting this disclosure, all terms should be interpreted in the broadest possible manner consistent with the context. Variations of the term “comprising” should be interpreted as referring to elements, components, or steps in a non-exclusive manner, so the referenced elements, components, or steps may be combined with other elements, components, or steps that are not expressly referenced. Embodiments referenced as “comprising” certain elements are also contemplated as “consisting essentially of” and “consisting of” those elements. The term “consisting essentially of” and “consisting of” should be interpreted in line with the MPEP and relevant Federal Circuit interpretation. The transitional phrase “consisting essentially of” limits the scope of a claim to the specified materials or steps “and those that do not materially affect the basic and novel characteristic(s)” of the claimed invention. “Consisting of” is a closed term that excludes any element, step or ingredient not specified in the claim. For example, with regard to sequences “consisting of” refers to the sequence listed in the SEQ ID NO. and does refer to larger sequences that may contain the SEQ ID as a portion thereof.

[0136] All publications, patent applications, patents, and other references mentioned herein are incorporated by reference in their entirety. In the case of conflict, the present specification, including definitions, will control.

[0137] Other features and advantages of the invention will be apparent from the description of the preferred embodiments thereof, and from the claims. Unless otherwise defined, all technical and scientific terms used herein have the same meaning as commonly understood by one of ordinary skill in the art to which this invention belongs. Although methods and materials similar or equivalent to those described herein can be used in the practice or testing of the present invention, suitable methods and materials are described below. In addition, the materials, methods, and examples are illustrative only and not intended to be limiting.

### EXAMPLES

### Example 1: Landscape of Antibody Binding in SARS-CoV-2 Infection

[0138] The search for potential antibody-based diagnostics, vaccines, and therapeutics for pandemic severe acute respiratory syndrome coronavirus 2 (SARS-CoV-2) has focused almost exclusively on the spike (S) and nucleocapsid (N) proteins. Coronavirus membrane (M), ORF3a, and ORF8 proteins are humoral immunogens in other coronaviruses (CoVs) but remain largely uninvestigated for SARS-CoV-2. Here, we use ultradense peptide microarray mapping to show that SARS-CoV-2 infection induces robust antibody responses to epitopes throughout the SARS-CoV-2 proteome, particularly in M, in which one epitope achieved excellent diagnostic accuracy. The peptides specific for SARS-CoV-2 of the present invention were identified as at least 2 contiguous, overlapping peptides in which the average log 2-normalized intensity in the patients was at least 2.0-fold greater than that in the controls and for which t-tests produced adjusted p-values of <0.01. All patients showed IgG antibody binding to proteins in the SARS-CoV-2 proteome (GenBank Accession: NC_045512.2). The inventors observed responses specific to SARS-CoV-2 infection status in both structural and non-structural proteins. Specifically, peptides comprising infection-specific epitopes were identified in the SARS-CoV-2 spike, membrane, nucleocapsid, orf3a, orf6, and orfB proteins. The peptides or epitopes detailed in some embodiments are named by the position in the protein in which they are found, the protein (S-spike, M-membrane, N-nucleocapsid, etc) and the epitope's length. The inventors found the highest fluorescence intensity and the most sensitive and specific responses in antibody binding to the SARS-CoV-2 membrane protein. All patient sera showed consistent responses in the SARS-CoV-2 membrane protein in one epitope located at the N-terminus (specifically ITVEELKKLLEQWNLV (SEQ ID NO:1), found in MADSNGTITVEELKKLLEQWNLVI (SEQ ID NO:17), which was not recognized by any control. Other epitopes in membrane protein were similarly specific to COVID-19 patients.

[0139] Patient sera showed specific reactivity in several epitopes in SARS-CoV-2 spike protein, particularly in three epitopes in the S2 region (amino acids 686-1273). The inventors did not detect any linear epitopes in the receptor binding domain (RBD, amino acids 319-541), though one epitope detected (TESNKKFLPFQQFGRDIADTTDA (SEQ ID NO:97) or TESNKKFLPFQQFGRDIADTTDAVRD (SEQ ID NO:23)) is immediately adjacent to the RBD. The inventors also observed sensitive and specific binding in the nucleocapsid protein, while antibody binding throughout SARS-CoV-2 envelope protein was sparse in controls and patients alike. Antibody binding to non-structural proteins, though less sensitive, was specific for SARS-CoV-2 infection. As described above, these peptides can be used in compositions, vaccines, vectors, diagnostics, kits, methods for detecting SARS-CoV-2 infection and methods of inducing an immune response against SARS-CoV-2, as described herein and throughout the Exhibits.

[0140] In this Example, the inventors map 79 B cell epitopes throughout the SARS-CoV-2 proteome and demonstrate that antibodies that develop in response to SARS-CoV-2 infection bind homologous peptide sequences in the 6 other known human CoVs. Reactivity against 4 of our top-ranking epitopes by enzyme-linked immunosorbent assay (ELISA) was also confirmed. Illness severity correlated with increased reactivity to 9 SARS-CoV-2 epitopes in S, M, N, and ORF3a in our population. Our results demonstrate previously unknown, highly reactive B cell epitopes throughout the full proteome of SARS-CoV-2 and other CoV proteins.

[0141] Results

### SARS-CoV-2-Naïve Controls Show Consistent Binding in “Common Cold” CoVs and Limited Binding in SARS-CoV-2, SARS-CoV, and MERS-CoV

[0142] Greater than 90% of adult humans are seropositive for the human “common cold” CoVs (CCCoVs: HCoV-HKU1, HCoV-OC43, HCoV-NL63, and HCoV-229E), but the effect of these preexisting antibodies upon immune responses to SARS-CoV-2 or other CoVs remains uncertain. We measured IgG reactivity in sera from 20 SARS-CoV-2-naïve controls to CoV linear peptides, considering reactivity that was >3.00 standard deviations above the mean for the log₂-quantile normalized array data to be indicative of antibody binding. All sera (SARS-CoV-2-naïve and COVID-19-convalescent) exhibited binding in known epitopes of at least one of the control non-CoV strains (poliovirus vaccine and rhinovirus; FIG. 1), and all were collected in Wisconsin, United States of America, where exposure to SARS-CoV or MERS-CoV was extremely unlikely. We found that at least 1 epitope in structural or accessory proteins showed binding in 100% of controls for HCoV-HKU1, 85% of controls for HCoV-OC43, 65% for HCoV-NL63, and 55% for HCoV-229E (FIG. 2). The apparent cross-reactive binding was observed in 45% of controls for MERS-CoV, 50% for SARS-CoV, and 50% for SARS-CoV-2. We completed neutralization assays on 12 of these control samples and on 18 additional samples from other SARS-CoV-2-naïve controls collected before 2019, and none of these had detectable neutralization activity against SARS-CoV-2 (FIG. 9).

[0143] SARS-CoV-2 Infection Induces Antibodies Binding Throughout the Proteome

[0144] We aimed to map the full breadth of IgG binding induced by SARS-CoV-2 infection and to rank the identified epitopes in terms of likelihood of immunodominance. We defined epitope recognition as antibody binding to contiguous peptides in which the average log₂-normalized intensity for patients was at least 2-fold greater than for controls with t test statistics yielding adjusted p-values <0.1. We chose these criteria, rather than the 3.00 standard deviation cutoff, in order to ensure that binding detected would be greater than background binding seen in controls (2-fold greater) and to remove regions of binding that were not at least weakly significantly different from controls (adjusted p<0.1). All COVID-19 convalescent patients' sera bound multiple epitopes in SARS-CoV-2, including in 2 patients who did not have detectable neutralizing antibodies in neutralization assays (FIG. 9). Top-ranking epitopes had greater correlations (0.7 and greater) with neutralization titers

TABLE 1
Profiling antibody binding in 40 COVID-19 convalescent patients compared to 20 naive
controls identifies B cell epitopes in SARS-CoV-2 (all data is log₂-normalized)

| | | | | | | | | | | | | SEQ |
|---|---|---|---|---|---|---|---|---|---|---|---|---|
| | | | | | | | | | | | | ID |
| Protein | [symbol] | [symbol] | Sequence | [symbol] | [symbol] | [symbol] | [symbol] | [symbol] | [symbol] | [symbol] | [symbol] | NO: |
| [symbol] | [symbol] | [symbol] | [symbol] | [symbol] | [symbol] | [symbol] | [symbol] | [symbol] | [symbol] | [symbol] | [symbol] | [symbol] |

aa, amino acid; COVID-19, coronavirus disease 2019; M, membrane; N, nucleocapsid: S, spike; SARS-CoV-2, severe acute respiratory syndrome coronavirus 2. [symbol]
indicates data missing or illegible when filed

[0145] These criteria identified 79 B cell epitopes (FIG. 3, Table 1) in S, M, N, ORFlab, ORF3a, ORF6, and ORF8. We ranked these epitopes by minimum adjusted p-value for any 16-mer in the epitope in order to determine the greatest likelihood of difference from controls as a proxy for likelihood of immunodominance. The highest-ranking epitope occurred in the N-terminus of M (1-M-24). Patient sera showed high magnitude reactivity (up to an average of 6.7 fluorescence intensity units) in other epitopes in S, M, N, and ORF3a, with lower-magnitude reactivity (average of <3.3 fluorescence intensity units) epitopes in other proteins. The epitopes with the greatest reactivity in S were located in the S2 subunit of the protein (residues 686-1273) rather than the S1 subunit (residues 14-685) (FIG. 3). The greatest reactivity in S occurred in the fusion peptide (residues 788-806) and at the base of the extracellular portion of the protein (between the heptad repeat 1 and heptad repeat 2, roughly residues 984-1163) (FIGS. 3 and 4). The highest magnitude antibody binding (red sites in FIG. 4A) on S are below the flexible head region that must be in the “up” position for angiotensin converting enzyme 2 (ACE2) binding to occur. Notably less reactivity occurred in the receptor-binding domain (RBD) (residues 319-541). Four detected epitopes (553-5-26, 624-5-23, 807-S-26, and 1140-S-25) have previously been shown to be potently neutralizing (Poh C M, Carissimo G, Wang B, Amrun S N, Lee C Y, Chee R S, et al. Two linear epitopes on the SARS-CoV-2 spike protein that elicit neutralising antibodies in COVID-19 patients. Nat Commun. 2020; 11:2806. pmid: 32483236; Zhang B Z, Hu Y F, Chen L L, Yau T, Tong Y G, Hu J C, et al. Mining of epitopes on spike protein of SARS-CoV-2 from COVID-19 patients. Cell Res. 2020; 30(8):702-4. pmid: 32612199; Li Y, Lai D Y, Zhang H N, Jiang H W, Tian X, Ma M L, et al. Linear epitopes of SARS-CoV-2 spike protein elicit neutralizing antibodies in COVID-19 patients. Cell Mol Immunol. 2020; 17:1095-7. pmid: 32895485), and all 4 of these were ranked within the top 10 of our 79 epitopes. Forty-two of our detected epitopes (including 1-M-24, 553-S-26, 624-S-23, 807-S-26, and 1140-S-25; Table 1) confirm bioinformatic predictions of antigenicity based on SARS-CoV and MERS-CoV, including each of the 12 top-ranking epitopes.

[0146] The highest specificity (100%) and sensitivity (98%), determined by linear discriminant analysis leave-one-out cross-validation, for any individual peptide was observed for a 16-mer within the 1-M-24 epitope: ITVEELKKLLEQWNLV (SEQ ID NO:1, FIG. 11 (Table 3)). Fifteen additional individual peptides in M, S, and N had 100% measured specificity and at least 80% sensitivity (Table 2, derived from epitopes found in Table 10A). Combinations of 1-M-24 with 1 of 5 other epitopes (384-N-33, 807-S-26, 6057-ORFlab-17, 227-N-17, and 4451-ORFlab-16) yielded an area under the curve receiver operating characteristic of 1.00 (FIG. 12 (Table 4)) based on linear discriminant analysis leave-one-out-cross-validation.

TABLE 2
Sixteen peptides in the SARS-CoV-2 proteome had 100% specificity and at
least 80% sensitivity for SARS-CoV-2 infection in 40 COVID-19 convalescent
patients compared to 20 naive controls.

| | First aa | | SEQ | Speci- | Sensi- | |
|---|---|---|---|---|---|---|
| Protein | position | Sequence | ID NO: | ficity | tivity | F1 |
| M | 8 | ITVEELKKLLEQWNLV | 1 | 1 | 0.98 | 0.99 |
| M | 7 | TITVEELKKLLEQWNL | 2 | 1 | 0.95 | 0.97 |
| N | 390 | QTVTLLPAADLDDESK | 3 | 1 | 0,95 | 0.97 |
| N | 388 | KQQTVILLPAADLDDF | 4 | 1 | 0.90 | 0.95 |
| N | 391 | TVILLPAADLDDFSKQ | 5 | 1 | 0.90 | 0.95 |
| S | 570 | ADTTDAVRDPQTLEIL | 6 | 1 | 0.88 | 0.93 |
| S | 571 | DTTDAVRDPQTLEILD | 7 | 1 | 0.88 | 0.93 |
| S | 574 | DAVRDPQTLEILDITP | 8 | 1 | 0.85 | 0.92 |
| S | 576 | VRDPQTLEILDITPCS | 9 | 1 | 0.85 | 0.92 |
| S | 1253 | CCKFDEDDSEPVLKGV | 10 | 1 | 0.85 | 0.92 |
| S | 572 | TTDAVRDPQTLEILDI | 11 | 1 | 0.83 | 0.90 |
| S | 573 | TDAVRDPQTLEILDIT | 12 | 1 | 0.83 | 0.90 |
| S | 577 | RDPQTLEILDITPCSF | 13 | 1 | 0.83 | 0.90 |
| S | 1252 | SCCKFDEDDSEPVLKG | 14 | 1 | 0.83 | 0.90 |
| M | 162 | KDLPKEITVATSRTLS | 15 | 1 | 0.83 | 0.90 |
| S | 1250 | CGSCCKFDEDDSEPVL | 16 | 1 | 0.80 | 0.89 |

aa, amino acid; COVID-19, coronavirus disease 2019; M, membrane; N, nucleocapsid; S, spike; SARS-CoV-2, severe acute respiratory syndrome coronavirus 2.

[0147] Anti-SARS-CoV-2 Antibodies May Cross-Reactively Bind Peptides in Other CoVs

[0148] We determined epitopes bound by anti-SARS-CoV-2 antibodies in non-SARS-CoV-2 CoVs by the same criteria we used to determine epitopes in SARS-CoV-2. Epitopes in these viruses were defined as binding by antibodies in COVID-19 convalescent sera to peptides at an average log₂-normalized intensity at least 2-fold greater than in controls with t test statistics yielding adjusted p-values <0.1. Some of these epitopes were identical sequences with SARS-CoV-2, particularly in the RaTGI3 bat betacoronavirus (0-CoV), the closest known relative of SARS-CoV-2 (96% nucleotide identity), the pangolin CoV (85% nucleotide identity with SARS-CoV-2), and SARS-CoV (78% identity). Cross-reactivity of an antibody is typically determined by evaluating a pure preparation of specific antibodies or by competition assays. However, since our Wisconsin controls are almost certainly naïve to MERS-CoV, SARS-CoV, and bat and pangolin CoVs, we can make predictions about cross-reactivity (as opposed to binding due to sequence identity).

[0149] Antibodies in COVID-19-convalescent sera appeared to be cross-reactive with identical or homologous epitopes in S, M. N, ORFlab, ORF3, ORF6, and ORF8 in other CoVs (FIG. 5, FIG. 10, and FIGS. 14 and 15 (Table 6 and 7)). Overall, the greatest number of epitopes in any non-SARS-CoV-2 CoV occurred in the RaTG13 bat β-CoV at 74 epitopes (60 identical to SARS-CoV-2, 13 homologous nonidentical, 1 without a homologous SARS-CoV-2 epitope). The second greatest number, 60 epitopes, occurred in the pangolin CoV (23 identical to SARS-CoV-2, 30 homologous nonidentical, 6 without a homologous SARS-CoV-2 epitope, 1 without a homologous region in SARS-CoV-2), and third SARS-CoV with 45 epitopes, (10 identical to SARS-CoV-2, 32 homologous nonidentical, 3 without a homologous SARS-CoV-2 epitope) (FIGS. 14 and 15, Tables 6 and 7). Most (8 of 12) of the epitopes that were not in areas having epitopes in the homologous SARS-CoV-2 region occurred in ORFlab, with the others occurring in S (2 epitopes) and N (2 epitopes). These epitopes were not conserved among each other and were not conserved with any epitopes in the CCCoVs (FIG. 14. Table 6).

[0150] One region, corresponding to SARS-CoV-2 epitope 807-S-26, showed binding or potential cross-reactivity across all CoVs. and one, corresponding to SARS-CoV-2 epitope 1 140-5-25, showed binding or potential cross-reactivity across all β-CoVs (FIG. 5). Epitope 807-5-26 includes the CoV S fusion peptide, and 1140-5-25 is immediately adjacent to the heptad repeat region 2, both of which are involved in membrane fusion.

[0151] Enzyme-Linked Immunosorbent Assays (ELISAs) Confirm Peptide Microarray Findings

[0152] Having determined reactivity and apparent cross-reactivity by peptide array, we aimed to independently confirm and validate these findings by ELISA. We selected 4 peptides for ELISA evaluation (1253-5-16, 814-S-16, 8-M-16, and 3′)0-N-16) from those in our top 10 ranked epitopes, considering diversity among the proteins represented, association with neutralizing capacity, and potential cross-reactivity across multiple CoVs, and using the 16-mer in each epitope that most correctly discriminated between patients and controls. All 4 SARS-CoV-2 peptides had higher IgG binding in COVID-19 convalescent sera than in controls (FIG. 6). Peptide 8-M-16 showed the greatest discrimination between COVID-19 convalescent and control sera with only 3 COVID-19 convalescent samples having values similar to controls. Both peptides 1253-S-16 and 814-S-16 showed greater binding in controls than either 8-M-16 or 3′9)-N-16, confirming our findings of greater potential cross-reactivity among epitopes found in S.

[0153] Reactivity in Some Epitopes Correlates with Disease Severity

[0154] Increased antibody titer and duration have been associated with increased severity of illness due to infection with SARS-CoV-2 and other CoVs, although data on epitope-level differences by severity is lacking. We compared reactivity in patients within our cohort whose COVID-19 course required intubation and mechanical ventilation (n=8) with reactivity in COVID-19 convalescent patients who never required hospitalization (n=25) using multilinear regression accounting for age, sex, immunocompromising conditions, and Charlson comorbidity index score to determine epitope-level resolution of differences in reactivity. Nine epitopes in S (2 epitopes), M (1 epitope), N (2 epitopes), and ORF3a (4 epitopes) showed statistically significant (p<0.05) increases in reactivity for intubated patients relative to never-hospitalized patients (FIG. 7. FIG. 13 (Table 5)). The S epitopes (289-S-17 and 613-S-25) both occurred in the S1 subunit (aa 14-685), with one (289-S-17) in the N-terminal domain (see FIG. 4D), whose function is not well understood but which may play a role in membrane fusion. The M epitope (1-M-24) was the highly reactive epitope in the N-terminus of this protein discussed above. The N epitopes (336-N-16 and 376-N-22) occurred in the C-terminal domain (336-N-16), which is thought to bind nucleic acids, and in the unstructured C-tail (376-N-22). The ORF3a epitopes clustered near the N-terminus of the protein (16-ORF3a-16, 18-ORF3a-16, and 21-ORF3a-16) with one other epitope nearer the C-terminus (252-ORF3a-24). No epitopes showed statistically significant increases in reactivity for never-hospitalized patients relative to intubated patients (FIG. 13 (Table 5)).

### DISCUSSION

[0155] In our analysis of antibody binding to the full proteome of SARS-CoV-2, the highest magnitude binding of anti-SARS-CoV-2 antibodies from human sera occurred for an epitope in the N-terminus of M protein, with high specificity and sensitivity. Antibodies produced after infection with SARS-CoV-2 reacted with epitopes throughout the proteomes of other human and nonhuman CoVs, recognizing homologous regions across all CoVs. Taken together, these results confirm that humans mount strong, broad antibody responses to SARS-CoV-2 proteins in addition to S and N, and they implicate M epitopes as highly relevant to diagnostic and potentially to vaccine design.

[0156] M proteins are the most abundant proteins in CoV virions. The N-terminus of M is known in other CoVs to be a small, glycosylated ectodomain that protrudes outside the virion and interacts with S, N, and E, while the rest of M resides within the viral particle. Full-length SARS-CoV M has been shown to induce protective antibodies, and patterns of antibodies binding to SARS-CoV M are similar to those we found in SARS-CoV-2. SARS-CoV anti-M antibodies can synergize with anti-S and anti-N antibodies for improved neutralization, and M has been used in protective SARS-CoV and MERS-CoV vaccines. However, the mechanism of protection of anti-M antibodies remains unknown, and this protein remains largely understudied and underutilized as an antigen. Other groups have not previously identified the high magnitude binding we observed for M, though that may be due to other studies' use of samples collected earlier in the course of infection or different techniques, populations, or computational algorithms. Notably, some of the highest binding we observed in the S protein occurred at the base of the extracellular portion of the protein, which would be the site of the putative interaction between SARS-CoV-2 S and M. The ACE2 binding site and the RBD in general are not as reactive, by these methods, as expected, suggesting that other, less-investigated epitopes may be playing a larger role in immunity to SARS-CoV-2 than is currently appreciated, which is further bolstered by the correlation of some of this binding with neutralizing titers. Our results, in concert with prior knowledge of anti-SARS-CoV antibodies, strongly suggest that epitopes in M, particularly the 1-M-24 epitope as well as other novel epitopes we identified, should be investigated further as potential targets in SARS-CoV-2 diagnostics, vaccines, and therapeutics.

[0157] Among the accessory proteins against which we detected antibodies, ORF8 has been the best studied. The ORF8 gene is part of a hypervariable region, having undergone multiple substitutions and deletions and being recognized as a recombination hotspot. ORF8 protein is considered to have immunomodulatory activity and has been shown to potently down-regulate major histocompatibility complex class I expression in several cell lines and to antagonize interferon signaling. A deletion in ORF8 appears to be associated with a milder clinical COVID-19 course, and ORF8 has been shown to be secreted, indicating that the epitopes we defined here may merit further investigation for development of potential vaccines and therapeutics. Less is known about the other SARS-CoV-2 accessory proteins in which we found epitopes, ORF3a and ORF6, although some studies have implicated them in immunomodulatory functions.

[0158] Interestingly, we found antibodies bind or bind adjacent to a number of the mutations in some of the “variants of concern” (VOCs) of SARS-CoV-2, which have recently emerged, so named because they appear to potentially be more transmissible than previous known variants or to escape antibody binding. The epitopes we defined contained or were immediately adjacent to the locations of the majority of the variant-defining mutation sites in the structural and accessory proteins of the B.1.1.7 and B.1.351 variants and to one-quarter of the structural or accessory protein mutation sites of the P.1, B.1.427, and B.1.429 variants (see FIG. 16 (Table 8)). These results suggest that antigen escape may be driving the rise and dominance of variants. Recent works have demonstrated this phenomenon with mutations in S but have not investigated this possibility for other proteins. Our findings suggest that antibodies to non-S proteins may be important to this process, as well.

[0159] We also found that antibodies produced in response to SARS-CoV-2 infection appear to bind peptides representing homologous epitopes throughout the proteomes of other human and nonhuman CoVs. Hundreds of CoVs have been discovered in bats and other species, making future spillovers inevitable. The potential broad cross-reactivity we observed in some homologous peptide sequences may help guide the development of pan-CoV vaccines, especially given that antibodies binding to 807-S-26 and 1140-S-25, which showed potential cross-reactivity across all CoVs and all β-CoVs, respectively, are known to be potently neutralizing. A caveat is that our methods cannot discern whether the increased IgG binding to CCCoVs in COVID-19 convalescent sera is due to newly developed cross-reactive antibodies or due to the stimulation of a memory response against the original CCCoV antigens. However, cross-reactivity of anti-SARS-CoV-2 antibodies with SARS-CoV or MERS-CoV is likely real, since our population was very unlikely to have been exposed to those viruses. Further, our methods efficiently detect antibody binding to linear epitopes, but their sensitivity for detecting parts of conformational epitopes, which are considered highly important in the immune response to SARS-CoV-2 and which are believed to be the type of epitope found within the RBD, is unknown. It is interesting to note that SARS-CoV-2 infection resulted in some antibodies that bound epitopes in other coronaviruses without binding the homologous part of SARS-CoV-2. These epitopes were not conserved with each other (FIG. 14), and most of this binding occurred in nonstructural proteins in ORFlab, which may indicate that this was nonspecific binding resulting from a generalized immune activation.

[0160] Finally, we demonstrated that more severely ill patients have significantly greater reactivity to certain epitopes in S, M, N, and ORF3a. The 9 epitopes with significantly higher magnitude reactivity in intubated patients may play a role in the overaggressive immune response known to characterize severe COVID-19, suggesting that they may be targets for treatment in or prevention of severe disease. Our data collection included date of first positive test but not of symptom onset, but future studies that include these data could investigate potential correlations between symptoms and antibody kinetics. Alternatively, the antibody response in general may be higher in very sick patients. expanding the repertoire of antibody reactivity. Future studies should investigate whether these differences can be detected early in the disease course to determine their potential utility as predictive markers of disease severity. Future studies may also investigate these epitopes' potential as targets for medical countermeasures, although consideration should be given to the small sample size of our investigation.

[0161] Our extensive profiling of epitope-level resolution antibody reactivity in COVID-19 convalescent patients, confirmed by independent assays, provides new epitopes that could serve as important targets in the development of improved diagnostics, vaccines, and therapeutics against SARS-CoV-2 and dangerous human CoVs that may emerge in the future.

[0162] Methods

[0163] Peptide Microarray Design and Synthesis

[0164] Viral protein sequences were selected and submitted to Nimble Therapeutics (Madison, Wisconsin, USA) for development into a peptide microarray (Heffron A S, Mohr E L, Baker D, Haj A K, Buechler C R, Bailey A. et al. Antibody responses to Zika virus proteins in pregnant and non-pregnant macaques. PLoS Negl Trop Dis. 2018; 12: e0006903. pmid: 30481182). Sequences represented include proteomes of all 7 coronaviruses known to infect humans, proteomes of closely related coronaviruses found in bats and pangolins, and spike proteins from other coronaviruses (accession numbers and replicates per peptide shown in FIG. 16 (Table 8)). A number of proteins were included as controls, including poliovirus, 7 strains of human rhinovirus, and human cytomegalovirus 65 kDa phosphoprotein. We chose these controls given that we expect most human adults will have antibody reactivity to at least one of these proteins and proteomes. Accession numbers used to represent each viral protein are listed in the Supporting information (accession numbers and replicates per peptide shown in FIG. 16 (Table 8)). All proteins were tiled as 16 amino acid peptides overlapping by 15 amino acids. All unique peptides were tiled in a lawn of thousands of copies, with each unique peptide represented in at least 3 and up to 5 replicates (FIG. 16). The peptide sequences were synthesized in situ with a Nimble Therapeutics Maskless Array Synthesizer (MAS) by light-directed solid-phase peptide synthesis using an amino-functionalized support (Geiner Bio-One) coupled with a 6-aminohexanoic acid linker and amino acid derivatives carrying a photosensitive 2-(2-nitrophenyl) propyloxycarbonyl (NPPOC) protection group (Orgentis Chemicals). Unique peptides were synthesized in random positions on the array to minimize impact of positional bias. Each array consists of 12 subarrays, where each subarray can process 1 sample, and each subarray contains up to 389,000 unique peptide sequences.

[0165] Human Patients and Controls

[0166] The study was conducted in accordance with the Declaration of Helsinki and approved by the Institutional Review Board of the University of Wisconsin-Madison. Clinical data and sera from patients infected with SARS-CoV-2 were obtained from the University of Wisconsin (UW) COVID-19 Convalescent Biobank and from controls (sera collected prior to 2019) from the UW Rheumatology Biobank. All patients and controls were 18 years of age or older at the time of recruitment and provided informed consent. COVID-19 convalescent patients had a positive SARS-COV-2 PCR test at UW Health with sera collected 5 to 6 weeks after self-reported COVID-19 symptom resolution except blood was collected for 1 patient after 9 weeks. Age, sex, medications, and medical problems were abstracted from UW Health's electronic medical record (EMR). Race and ethnicity were self-reported. Hospitalization and intubation for COVID-19 and smoking status at the time of blood collection (controls) or COVID-19 were obtained by EMR abstraction and self-report and were in complete agreement. Two-thirds of COVID-19 convalescent patients and all controls had a primary care appointment at UW Health within 2 years of the blood draw as an indicator of the completeness of the medical information. Patients and controls were considered to have an immunocompromising condition if they met any of the following criteria: immunosuppressing medications, systemic inflammatory or autoimmune disease, cancer not in remission, uncontrolled diabetes (secondary manifestations or hemoglobin A1c>7.0%), or congenital or acquired immunodeficiency. Controls and COVID-19 patients were similar in regard to demographics and health (FIG. 16), and patients who were not hospitalized, were hospitalized, or were hospitalized and intubated also were compared (FIG. 16). No patients or controls were current smokers.

[0167] Peptide Array Sample Binding

[0168] Samples were diluted 1:100 in binding buffer (0.01 M Tris-Cl (pH 7.4), 1% alkali-soluble casein, 0.05% Tween-20) and bound to arrays overnight at 4° C. After sample binding, the arrays were washed 3× in wash buffer (1× TBS, 0.05% Tween-20), 10 minutes per wash. Primary sample binding was detected via Alexa Fluor 647-conjugated goat anti-human IgG secondary antibody (Jackson ImmunoResearch, West Grove, Pennsylvania, United States of America). The secondary antibody was diluted 1:10,000 (final concentration 0.1 ng/μl) in secondary binding buffer (1× TBS, 1% alkali-soluble casein, 0.05% Tween-20). Arrays were incubated with secondary antibody for 3 hours at room temperature, then washed 3× in wash buffer (10 minutes per wash), washed for 30 seconds in reagent-grade water, and then dried by spinning in a microcentrifuge equipped with an array holder. The fluorescent signal of the secondary antibody was detected by scanning at 635 nm at 2 μm resolution using an Innopsys 910AL microarray scanner. Scanned array images were analyzed with proprietary Nimble Therapeutics software to extract fluorescence intensity values for each peptide.

[0169] Peptide Microarray Findings Validation

[0170] We included sequences on the array of viruses that we expected all adult humans to be likely to have been exposed to as positive controls: 1 poliovirus strain (measuring vaccine exposure) and 7 rhinovirus strains. Any patient or control whose sera did not react to at least 1 positive control would be considered a failed run and removed from the analysis. All patients and controls in this analysis reacted to epitopes in at least 1 control strain (FIG. 1).

[0171] Peptide Microarray Data Analysis

[0172] The raw fluorescence signal intensity values were log₂ transformed. Clusters of fluorescence intensity of statistically unlikely magnitude, indicating array defects, were identified and removed. Local and large area spatial corrections were applied, and the median transformed intensity of the peptide replicates was determined. The resulting median data was cross-normalized using quantile normalization.

[0173] Neutralization Assay

[0174] Virus neutralization assays were performed with SARS-CoV-2/UW-001/Human/2020/Wisconsin on Vero E6/TMPRSS2. Virus (approximately 100 plaque-forming units) was incubated with the same volume of 2-fold dilutions of heat-inactivated serum for 30 minutes at 37° C. The antibody/virus mixture was added to confluent Vero E6/TMPRSS2 cells that were plated at 30,000 cells per well the day prior in 96-well plates. The cells were incubated for 3 days at 37° C. and then fixed and stained with 20% methanol and crystal violet solution. Virus neutralization titers were determined as the reciprocal of the highest serum dilution that completely prevented cytopathic effects.

[0175] Protein Structures

[0176] The SARS-CoV-2 S-chimera.pdb used to make S protein structures is a chimeric structure built by Robert Kirchdoerfer using 6VYB.pdb, 5X4S.pdb, and 6LZG coordinates and filling in internal unresolved residues from known (presumably) analogous sites determined for SARS-CoV S from 6CRV.pdb. Additional unmodeled regions were generated using Modeller. C-proximal HR2 regions were modeled as single helices (Phe1148-Leu1211) in Coot.

[0177] The data2bfactor Python script written by Robert L. Campbell. Thomas Holder, and Suguru Asai (downloaded from pldserver1.biochem.queensu.ca/˜rlc/work/pymol/) used to substitute peptide array data onto this structure in place of the B factor in PyMol (The PyMOL Molecular Graphics System. Version 2.0 Schrödinger, LLC) using a dark blue (low) to red (high) color scale. Data used for these visualizations were the average reactivity in the 40 COVID-19 convalescent patients, the average reactivity in the 20 naïve controls, and the difference between averages for the patients and for the controls.

[0178] Enzyme-Linked Immunosorbent Assays (ELISAs)

[0179] Costar 96-well high-binding plates (Corning. Coming, USA) were incubated at 4° C. overnight with 5 μg/ml streptavidin (Thermo Fisher Scientific, Waltham, USA) in PBS (Corning). Plates were washed twice with PBS and incubated at room temperature for 1 hour with 0.5 mM of the following peptides (Biomatik. Kitchener, Canada) in PBS: 814-S-16 (KRSFIEDLLFNKVTLA-K-biotin (SEQ ID NO:96), 1253-S-16 (CCKFDEDDSEPVLKGV-K-biotin (SEQ ID NO:10)), 390-N-16 (QTVTLLPAADLDDFSK-K-biotin (SEQ ID NO:3)), and 8-M-16 (TTVEELKKLLEQWNLV-K-biotin (SEQ ID NO:1)). Plates were washed thrice with wash buffer (0.2% Tween-20 in PBS), then incubated for 1 hour in blocking solution (5% nonfat dry milk in wash buffer) at room temperature, incubated overnight at 4° C. with sera at 1:200 in blocking solution, washed 4 times with wash buffer, incubated for 1 hour at room temperature with mouse anti-human IgG conjugated to horse radish peroxidase (Southern Biotech, Birmingham, USA) diluted 1:5,000 in blocking solution, washed 4 times with wash buffer, and incubated with tetramethyl benzidine substrate solution (Thermo Fisher Scientific) for 5 minutes followed by 0.18 M sulfuric acid. Absorbance was read on a FilterMax F3 Multi-mode Microplate reader (Molecular Devices, San Jose, USA) at 450 and 562 nm. Background signal from 562 nm absorbance and wells with no peptide and no serum were subtracted. Plates were normalized using a pooled serum sample on every plate. Absorbance values of 0 were plotted as 0.0002 to allow a log scale for graphs. Samples were run in duplicate.

[0180] Statistical Analysis

[0181] Statistical analyses were performed in R (v 4.0.2) using in-house scripts. For each peptide, a p-value from a two-sided t test with unequal variance between sets of patient and control responses were calculated and adjusted using the Benjamini-Hochberg (BH) algorithm. To determine whether the peptide was in an epitope (in SARS-CoV-2 proteins) or cross-reactive for anti-SARS-CoV-2 antibodies (in non-SARS-CoV-2 proteins), we used an adjusted p-value cutoff of <0.1 (based on multiple hypothesis testing correction for all 119.487 unique sequences on the array) and a fold-change of greater than or equal to 2 and grouped consecutive peptides as a represented epitope. Linear discriminant analysis leave-one-out cross validation was used to determine specificity and sensitivity on each peptide and from each epitope using the average signal of the component peptides. Pearson correlation for reactivity with neutralizing titer was calculated using each patient's or control's epitope signal and the log 2 signal of the respective neutralization value.

[0182] To identify cross-reactive epitopes, we used each SARS-CoV-2 epitope sequence as a query, searched the database of proteins from the sequences in the peptide array using blastp (-word-size 2, num-targets 4.000) to find homologous sequences in the bat, pangolin, and other human CoV strains, then determined whether the average log₂-normalized intensity for these sequences in patients was at least 2-fold greater than in controls with t test statistics yielding adjusted p-values <0.1. Each blast hit was then mapped back to the corresponding probe ranges.

[0183] For correlations of reactivity with clinical severity, for each patient, the epitope signal was determined by averaging the normalized signal from the epitopes corresponding probes. Each epitope average signal response was fit using a multilinear regression model accounting for age, sex (Female, Male), immunocompromised status (Yes. No), and Charlson comorbidity index score (Charlson M E, Pompei P. Ales K L, CR MK. A new method of classifying prognostic comorbidity in longitudinal studies: development and validation. J Chronic Dis. 1987; 40:373-83. pmid: 3558716) as additive. Contrasts between nonhospitalized and intubated patients were performed for each epitope with the fit models and p-values and log₂ fold-change were determined.

[0184] The clinical and demographic characteristics of convalescent patients were compared to those of the controls using λ2 tests for categorical variables and Wilcoxon rank-sum tests for nonnormally distributed continuous measures Heatmaps were created using the gridtext (Wilke CO. gridtext: Improved Text Rendering Support for ‘Grid’ Graphics. R package version 0.1.1.2020) and complexheatmap (Gu Z, Eils R, Schlesner M. Complex heatmaps reveal patterns and correlations in multidimensional genomic data. Bioinformatics. 2016; 32:2847-9. pmid: 27207943) packages in R. Alignments for heatmaps were created using MUSCLE (Edgar. MUSCLE: multiple sequence alignment with high accuracy and high throughput. Nucleic Acids Res. 2004; 32:1792-7. pmid: 15034147).

### Example 2: Method of Distinguishing Vaccination and Past SARS-CoV-2 Infection

[0185] This Example demonstrates that detection of antibodies that bind to the membrane peptides or proteins described herein can distinguish between a subject having been vaccinated to COVID-19 and a subject having past SARS-CoV-2 infection 12 months post-symptom resolution. Currently, the standards for testing for prior infection vs vaccination has been to detect for anti-nucleocapsid antibodies in addition to anti-spike antibodies in sera of an individual. However, as FIG. 8 demonstrates, anti-nucleocapsid peptide antibodies are decreased substantially over time after infection while anti-membrane peptides antibodies remain high and detectable, and suitably correlated with past SARS-CoV-2 infection. Thus, anti-membrane, but not anti-nucleocapsid or anti-spike receptor binding domain antibodies distinguish COVID-19 vaccinated subjects and subjects with past SARS-CoV-2 infection 12 months post-symptom resolution. FIG. 8A shows an ELISA quantification of IgG that binds a biotinylated peptide from SARS-CoV-2 membrane (ITVEELKKLLEQWNLV (SEQ ID NO:1)-K-biotin) and nucleocapsid protein (QTVTLLPAADLDDFSK (SEQ ID NO:3)-K-biotin) with results reported as absorbance (abs). Ig that binds to SARS-CoV-2 spike receptor binding domain (RBD) was detected using Lumit™ Dx SARS-CoV-2 Immunoassay (Promega) with results reported as sample/calibrator (S/C). By 12 months, 73 convalescent subjects had received at least one COVID-19 vaccine dose (12m Vax) and 16 were unvaccinated (12m Unvax). FIG. 8B demonstrates the receiver operating characteristic (ROC) curves generated using ELISA absorbance values for anti-membrane or anti-nucleocapsid IgG with sera from naive and 5w COVID-19 convalescent patients. Area under the curve (AUC) and Wald 95% confidence intervals are in parentheses. FIG. 8C was generated using the cutoffs in (A), the percent positive (black bars) and percent negative (gray bars) results were calculated for naive sera (n=60), sera from vaccinated individuals with no COVID-19 infection (n=21), and 5w (n=121), 3m (n=115), 6m (n=98), and 12m (n=100) COVID-19 convalescent sera.

1. A method of detecting the presence of SARS-CoV-2 antibodies in a sample, the method comprising:
contacting the sample with one or more peptide selected from SEQ ID NO:1-16 and Tables 1, 2, 6, 9-12 or a peptide having at least 90% sequence similarity to a peptide of SEQ ID NO:1-16 or in Tables 1, 2, 6, 9-12; and
detecting the binding of one or more antibodies from the sample to the one or more peptide by a detection agent, wherein the presence of the one or more antibodies within the sample indicates the presence of antibodies against SARS-CoV-2.

2. The method of claim 1, wherein the one or more peptide are selected from SEQ ID NO:1-16 or a peptide with at least 90% sequence similarity to a peptide in SEQ ID NO:1-16.

3. The method of claim 1, wherein one or more peptides are selected from Tables 11A-11B or a peptide with at least 90% sequence similarity to a peptide in Tables 11A-11B.

4. (canceled)

5. The method of claim 1, wherein the contacting step comprises two or more peptides.

6. The method of claim 1, wherein the contacting step comprises at least one membrane protein peptide selected from Table 2 or Tables 11A-11B or a peptide having at least 90% sequence similarity to the peptide in Table 2 or Tables 11A-11B.

7. The method of claim 1, wherein the detection agent is a secondary antibody or fragment thereof, preferably an anti-human IgG antibody or fragment thereof.

8. The method of claim 7, wherein the secondary antibody comprises a detectable tag, preferably wherein the detectable tag is selected from the group consisting of an enzymatic tag, a biotin tag, a chemiluminescent tag and a fluorescent tag.

9. The method of claim 1, wherein the sample is convalescent plasma for the detection of antibodies against SARS-CoV-2.

10. The method of claim 1, wherein the one or more peptide are selected from Tables 12A-12C or a peptide with at least 90% sequence similarity to a peptide in Tables 12A-12C.

11. An immunoassay for detecting antibodies to SARS-CoV-2 in a biological sample, the assay comprising:
a capture agent comprising one or more peptides selected from SEQ ID NO:1-16 and Tables 1, 2, 6 and 9-12 or a peptide with at least 90% similarity to one or more peptides in Tables 1. 2, 6 and 9-12, and
a detection agent capable of binding to the one or more antibodies that bind to the capture agent.

12. The immunoassay of claim 11, wherein the one or more peptides are attached to a solid or semi-solid support.

13. The immunoassay of claim 11, wherein the detection agent is a tagged anti-human antibody or fragment thereof that binds to human IgG, IgM or IgA antibody or fragment thereof.

14. The immunoassay of claim 11, wherein the capture agent comprises two or more peptides.

15. The immunoassay of claim 11, wherein the capture agent comprises at least one membrane protein peptide selected from Tables 1 and 9 or a peptide having at least 90% sequence similarity to the membrane protein peptide in Tables 1 and 9.

16. (canceled)

17. The immunoassay of claim 16, wherein the secondary antibody comprises a detectable tag, wherein the detectable tag is selected from the group consisting of an enzymatic tag, a biotin tag, a chemiluminescent tag and a fluorescent tag.

18-20. (canceled)

21. The immunoassay of claim 11, wherein the immunoassay is a high throughput assay, preferably a chemiluminescent microparticle immune assay (CMIA) or a chemiluminescent immunoassay (CLIA).

22. The immunoassay of claim 11, wherein the capture agent comprises at least one peptide of the membrane protein from Table 2 and at least one peptide of the spike protein from Table 2.

23-24. (canceled)

25. A method of detecting and distinguishing a subject infected with SARS-CoV-2, subject vaccinated and an uninfected individual comprising
obtaining a sample from a subject;
contacting the sample with the immunoassay of claim 22,
wherein detection of the peptide to the membrane protein can distinguish between a subject having had SARS-CoV-2 and a subject vaccinated.

26. A vaccine composition comprising an adjuvant and one or more peptides selected from Tables 1 and 2 or a peptide having at least 90% sequence similarity to one or more peptides in Tables 1, 2 and 9-12.

27-50. (canceled)

51. The method of claim 1, the method comprising:
a) contacting the sample with an antibody that binds to one or more peptides or epitopes selected from SEQ ID NO:1-16 and Tables 1, 2, 6, and 9-12, and
b) detecting the presence of a sample peptide bound to the antibody, wherein the presence of a sample peptide detects SARS-CoV-2 virus in the sample.

The application's sequence listing, which the Patent Office published only in electronic form, follows.

SEQUENCE LISTING (3076 sequences)

SEQ ID NO: 1 - protein, 16 aa, SARS-CoV-2
ITVEELKKLLEQWNLV

SEQ ID NO: 2 - protein, 16 aa, SARS-CoV-2
TITVEELKKLLEQWNL

SEQ ID NO: 3 - protein, 16 aa, SARS-CoV-2
QTVTLLPAADLDDFSK

SEQ ID NO: 4 - protein, 16 aa, SARS-CoV-2
KQQTVTLLPAADLDDF

SEQ ID NO: 5 - protein, 16 aa, SARS-CoV-2
TVTLLPAADLDDFSKQ

SEQ ID NO: 6 - protein, 16 aa, SARS-CoV-2
ADTTDAVRDPQTLEIL

SEQ ID NO: 7 - protein, 16 aa, SARS-CoV-2
DTTDAVRDPQTLEILD

SEQ ID NO: 8 - protein, 16 aa, SARS-CoV-2
DAVRDPQTLEILDITP

SEQ ID NO: 9 - protein, 16 aa, SARS-CoV-2
VRDPQTLEILDITPCS

SEQ ID NO: 10 - protein, 16 aa, SARS-CoV-2
CCKFDEDDSEPVLKGV

SEQ ID NO: 11 - protein, 16 aa, SARS-CoV-2
TTDAVRDPQTLEILDI

SEQ ID NO: 12 - protein, 16 aa, SARS-CoV-2
TDAVRDPQTLEILDIT

SEQ ID NO: 13 - protein, 16 aa, SARS-CoV-2
RDPQTLEILDITPCSF

SEQ ID NO: 14 - protein, 16 aa, SARS-CoV-2
SCCKFDEDDSEPVLKG

SEQ ID NO: 15 - protein, 16 aa, SARS-CoV-2
KDLPKEITVATSRTLS

SEQ ID NO: 16 - protein, 16 aa, SARS-CoV-2
CGSCCKFDEDDSEPVL

SEQ ID NO: 17 - protein, 24 aa, SARS-CoV-2
MADSNGTITVEELKKLLEQWNLVI

SEQ ID NO: 18 - protein, 33 aa, SARS-CoV-2
QRQKKQQTVTLLPAADLDDFSKQLQQSMSSADS

SEQ ID NO: 19 - protein, 26 aa, SARS-CoV-2
DIADTTDAVRDPQTLEILDITPCSFG

SEQ ID NO: 20 - protein, 27 aa, SARS-CoV-2
CCSCGSCCKFDEDDSEPVLKGVKLHYT

SEQ ID NO: 21 - protein, 31 aa, SARS-CoV-2
ARMAGNGGDAALALLLLDRLNQLESKMSGKG

SEQ ID NO: 22 - protein, 26 aa, SARS-CoV-2
PDPSKPSKRSFIEDLLFNKVTLADAG

SEQ ID NO: 23 - protein, 26 aa, SARS-CoV-2
TESNKKFLPFQQFGRDIADTTDAVRD

SEQ ID NO: 24 - protein, 27 aa, SARS-CoV-2
VKQIYKTPPIKDFGGFNFSQILPDPSK

SEQ ID NO: 25 - protein, 25 aa, SARS-CoV-2
PLQPELDSFKEELDKYFKNHTSPDV

SEQ ID NO: 26 - protein, 23 aa, SARS-CoV-2
IHADQLTPTWRVYSTGSNVFQTR

SEQ ID NO: 27 - protein, 32 aa, SARS-CoV-2
LGASQRVAGDSGFAAYSRYRIGNYKLNTDHSS

SEQ ID NO: 28 - protein, 28 aa, SARS-CoV-2
QNGERSGARSKQRRPQGLPNNTASWFTA

SEQ ID NO: 29 - protein, 16 aa, SARS-CoV-2
YTMADLVYALRHFDEG

SEQ ID NO: 30 - protein, 26 aa, SARS-CoV-2
AGHHLGRCDIKDLPKEITVATSRTLS

SEQ ID NO: 31 - protein, 18 aa, SARS-CoV-2
TGVLTESNKKFLPFQQFG

SEQ ID NO: 32 - protein, 25 aa, SARS-CoV-2
RSVASQSIIAYTMSLGAENSVAYSN

SEQ ID NO: 33 - protein, 18 aa, SARS-CoV-2
KSAAEASKKPRQKRTATK

SEQ ID NO: 34 - protein, 18 aa, SARS-CoV-2
KLNTDHSSSSDNIALLVQ

SEQ ID NO: 35 - protein, 16 aa, SARS-CoV-2
ITREEAIRHVRAWIGF

SEQ ID NO: 36 - protein, 18 aa, SARS-CoV-2
VTTTLEETKFLTENLLLY

SEQ ID NO: 37 - protein, 16 aa, SARS-CoV-2
ITISSFKWDLTAFGLV

SEQ ID NO: 38 - protein, 25 aa, SARS-CoV-2
QDVNCTEVPVAIHADQLTPTWRVYS

SEQ ID NO: 39 - protein, 16 aa, SARS-CoV-2
ITFDNLKTLLSLREVR

SEQ ID NO: 40 - protein, 17 aa, SARS-CoV-2
DFSRVSAKPPPGDQFKH

SEQ ID NO: 41 - protein, 26 aa, SARS-CoV-2
NNAAIVLQLPQGTTLPKGFYAEGSRG

SEQ ID NO: 42 - protein, 16 aa, SARS-CoV-2
KTVGELGDVRETMSYL

SEQ ID NO: 43 - protein, 20 aa, SARS-CoV-2
VYSTGSNVFQTRAGCLIGAE

SEQ ID NO: 44 - protein, 17 aa, SARS-CoV-2
RITFGGPSDSTGSNQNG

SEQ ID NO: 45 - protein, 21 aa, SARS-CoV-2
QNQRNAPRITFGGPSDSTGSN

SEQ ID NO: 46 - protein, 16 aa, SARS-CoV-2
STASALGKLQDVVNQN

SEQ ID NO: 47 - protein, 20 aa, SARS-CoV-2
YFKNHTSPDVDLGDISGINA

SEQ ID NO: 48 - protein, 19 aa, SARS-CoV-2
KLDDKDPNFKDQVILLNKH

SEQ ID NO: 49 - protein, 18 aa, SARS-CoV-2
GDEVRQIAPGQTGKIADY

SEQ ID NO: 50 - protein, 20 aa, SARS-CoV-2
LCVDEAGSKSPIQYIDIGNY

SEQ ID NO: 51 - protein, 22 aa, SARS-CoV-2
ADETQALPQRQKKQQTVTLLPA

SEQ ID NO: 52 - protein, 24 aa, SARS-CoV-2
SSGVVNPVMEPIYDEPTTTTSVPL

SEQ ID NO: 53 - protein, 21 aa, SARS-CoV-2
LESKMSGKGQQQQGQTVTKKS

SEQ ID NO: 54 - protein, 16 aa, SARS-CoV-2
IRGGDGKMKDLSPRWY

SEQ ID NO: 55 - protein, 16 aa, SARS-CoV-2
HIDAYKTFPPTEPKKD

SEQ ID NO: 56 - protein, 17 aa, SARS-CoV-2
NKCVNFNFNGLTGTGVL

SEQ ID NO: 57 - protein, 16 aa, SARS-CoV-2
TVAAFHQECSLQSCTQ

SEQ ID NO: 58 - protein, 17 aa, SARS-CoV-2
GGFNFSQILPDPSKPSK

SEQ ID NO: 59 - protein, 17 aa, SARS-CoV-2
LNQLESKMSGKGQQQQG

SEQ ID NO: 60 - protein, 18 aa, SARS-CoV-2
GSKSPIQYIDIGNYTVSC

SEQ ID NO: 61 - protein, 16 aa, SARS-CoV-2
KDEDDNLIDSYFVVKR

SEQ ID NO: 62 - protein, 17 aa, SARS-CoV-2
VDCALDPLSETKCTLKS

SEQ ID NO: 63 - protein, 19 aa, SARS-CoV-2
PEAGLPYGANKDGIIWVAT

SEQ ID NO: 64 - protein, 20 aa, SARS-CoV-2
TLSYYKLGASQRVAGDSGFA

SEQ ID NO: 65 - protein, 16 aa, SARS-CoV-2
QTRAGCLIGAEHVNNS

SEQ ID NO: 66 - protein, 16 aa, SARS-CoV-2
VTIAEILLIIMRTFKV

SEQ ID NO: 67 - protein, 19 aa, SARS-CoV-2
QGQTVTKKSAAEASKKPRQ

SEQ ID NO: 68 - protein, 17 aa, SARS-CoV-2
VNNSYECDIPIGAGICA

SEQ ID NO: 69 - protein, 16 aa, SARS-CoV-2
FNFNGLTGTGVLTESN

SEQ ID NO: 70 - protein, 16 aa, SARS-CoV-2
IAARDLICAQKFNGLT

SEQ ID NO: 71 - protein, 17 aa, SARS-CoV-2
QILPDPSKPSKRSFIED

SEQ ID NO: 72 - protein, 17 aa, SARS-CoV-2
NKDGIIWVATEGALNTP

SEQ ID NO: 73 - protein, 17 aa, SARS-CoV-2
GGDGKMKDLSPRWYFYY

SEQ ID NO: 74 - protein, 17 aa, SARS-CoV-2
KIVDEPEEHVQIHTIDG

SEQ ID NO: 75 - protein, 16 aa, SARS-CoV-2
PYGANKDGIIWVATEG

SEQ ID NO: 76 - protein, 16 aa, SARS-CoV-2
KSAPLIELCVDEAGSK

SEQ ID NO: 77 - protein, 16 aa, SARS-CoV-2
GANKDGIIWVATEGAL

SEQ ID NO: 78 - protein, 16 aa, SARS-CoV-2
AIKLDDKDPNFKDQVI

SEQ ID NO: 79 - protein, 16 aa, SARS-CoV-2
LDGEVITFDNLKTLLS

SEQ ID NO: 80 - protein, 16 aa, SARS-CoV-2
FTVEKGIYQTSNFRVQ

SEQ ID NO: 81 - protein, 16 aa, SARS-CoV-2
LLALHRSYLTPGDSSS

SEQ ID NO: 82 - protein, 18 aa, SARS-CoV-2
TGIAVEQDKNTQEVFAQV

SEQ ID NO: 83 - protein, 16 aa, SARS-CoV-2
KQGEIKDATPSDFVRA

SEQ ID NO: 84 - protein, 16 aa, SARS-CoV-2
VDLGDISGINASVVNI

SEQ ID NO: 85 - protein, 16 aa, SARS-CoV-2
SQPFLMDLEGKQGNFK

SEQ ID NO: 86 - protein, 16 aa, SARS-CoV-2
KDATPSDFVRATATIP

SEQ ID NO: 87 - protein, 16 aa, SARS-CoV-2
AEVAVKMFDAYVNTFS

SEQ ID NO: 88 - protein, 16 aa, SARS-CoV-2
NIQKEIDRLNEVAKNL

SEQ ID NO: 89 - protein, 16 aa, SARS-CoV-2
ECDIPIGAGICASYQT

SEQ ID NO: 90 - protein, 16 aa, SARS-CoV-2
GEIKDATPSDFVRATA

SEQ ID NO: 91 - protein, 16 aa, SARS-CoV-2
IAPGQTGKIADYNYKL

SEQ ID NO: 92 - protein, 17 aa, SARS-CoV-2
SPDVDLGDISGINASVV

SEQ ID NO: 93 - protein, 16 aa, SARS-CoV-2
TQLNRALTGIAVEQDK

SEQ ID NO: 94 - protein, 16 aa, SARS-CoV-2
LTLQQIELKFNPPALQ

SEQ ID NO: 95 - protein, 16 aa, SARS-CoV-2
TTVDNINLHTQVVDMS

SEQ ID NO: 96 - protein, 16 aa, SARS-CoV-2
KRSFIEDLLFNKVTLA

SEQ ID NO: 97 - protein, 23 aa, SARS-CoV-2
TESNKKFLPFQQFGRDIADTTDA

SEQ ID NO: 98 - protein, 16 aa, SARS-CoV-2
ITVEELKKLLEQWNLV

SEQ ID NO: 99 - protein, 16 aa, SARS-CoV-2
TITVEELKKLLEQWNL

SEQ ID NO: 100 - protein, 16 aa, SARS-CoV-2
QTVTLLPAADLDDFSK

SEQ ID NO: 101 - protein, 16 aa, SARS-CoV-2
KQQTVTLLPAADLDDF

SEQ ID NO: 102 - protein, 16 aa, SARS-CoV-2
TVTLLPAADLDDFSKQ

SEQ ID NO: 103 - protein, 16 aa, SARS-CoV-2
ADTTDAVRDPQTLEIL

SEQ ID NO: 104 - protein, 16 aa, SARS-CoV-2
DTTDAVRDPQTLEILD

SEQ ID NO: 105 - protein, 16 aa, SARS-CoV-2
DAVRDPQTLEILDITP

SEQ ID NO: 106 - protein, 16 aa, SARS-CoV-2
VRDPQTLEILDITPCS

SEQ ID NO: 107 - protein, 16 aa, SARS-CoV-2
CCKFDEDDSEPVLKGV

SEQ ID NO: 108 - protein, 16 aa, SARS-CoV-2
TTDAVRDPQTLEILDI

SEQ ID NO: 109 - protein, 16 aa, SARS-CoV-2
TDAVRDPQTLEILDIT

SEQ ID NO: 110 - protein, 16 aa, SARS-CoV-2
RDPQTLEILDITPCSF

SEQ ID NO: 111 - protein, 16 aa, SARS-CoV-2
SCCKFDEDDSEPVLKG

SEQ ID NO: 112 - protein, 16 aa, SARS-CoV-2
KDLPKEITVATSRTLS

SEQ ID NO: 113 - protein, 16 aa, SARS-CoV-2
CGSCCKFDEDDSEPVL

SEQ ID NO: 114 - protein, 16 aa, SARS-CoV-2
KRSFIEDLLFNKVTLA

SEQ ID NO: 115 - protein, 16 aa, SARS-CoV-2
NGTITVEELKKLLEQW

SEQ ID NO: 116 - protein, 16 aa, SARS-CoV-2
VTLLPAADLDDFSKQL

SEQ ID NO: 117 - protein, 16 aa, SARS-CoV-2
ADQLTPTWRVYSTGSN

SEQ ID NO: 118 - protein, 16 aa, SARS-CoV-2
KPSKRSFIEDLLFNKV

SEQ ID NO: 119 - protein, 16 aa, SARS-CoV-2
SNGTITVEELKKLLEQ

SEQ ID NO: 120 - protein, 16 aa, SARS-CoV-2
QQTVTLLPAADLDDFS

SEQ ID NO: 121 - protein, 16 aa, SARS-CoV-2
AVRDPQTLEILDITPC

SEQ ID NO: 122 - protein, 16 aa, SARS-CoV-2
QKKQQTVTLLPAADLD

SEQ ID NO: 123 - protein, 16 aa, SARS-CoV-2
GSCCKFDEDDSEPVLK

SEQ ID NO: 124 - protein, 16 aa, SARS-CoV-2
KFDEDDSEPVLKGVKL

SEQ ID NO: 125 - protein, 16 aa, SARS-CoV-2
TVEELKKLLEQWNLVI

SEQ ID NO: 126 - protein, 16 aa, SARS-CoV-2
DIKDLPKEITVATSRT

SEQ ID NO: 127 - protein, 16 aa, SARS-CoV-2
IKDLPKEITVATSRTL

SEQ ID NO: 128 - protein, 16 aa, SARS-CoV-2
SQRVAGDSGFAAYSRY

SEQ ID NO: 129 - protein, 16 aa, SARS-CoV-2
YTMADLVYALRHFDEG

SEQ ID NO: 130 - protein, 16 aa, SARS-CoV-2
DEDDSEPVLKGVKLHY

SEQ ID NO: 131 - protein, 16 aa, SARS-CoV-2
NGGDAALALLLLDRLN

SEQ ID NO: 132 - protein, 16 aa, SARS-CoV-2
GDAALALLLLDRLNQL

SEQ ID NO: 133 - protein, 16 aa, SARS-CoV-2
ESNKKFLPFQQFGRDI

SEQ ID NO: 134 - protein, 16 aa, SARS-CoV-2
KDFGGFNFSQILPDPS

SEQ ID NO: 135 - protein, 16 aa, SARS-CoV-2
GGDAALALLLLDRLNQ

SEQ ID NO: 136 - protein, 16 aa, SARS-CoV-2
ALLLLDRLNQLESKMS

SEQ ID NO: 137 - protein, 16 aa, SARS-CoV-2
KKFLPFQQFGRDIADT

SEQ ID NO: 138 - protein, 16 aa, SARS-CoV-2
QIYKTPPIKDFGGFNF

SEQ ID NO: 139 - protein, 16 aa, SARS-CoV-2
DSNGTITVEELKKLLE

SEQ ID NO: 140 - protein, 16 aa, SARS-CoV-2
LGASQRVAGDSGFAAY

SEQ ID NO: 141 - protein, 16 aa, SARS-CoV-2
GNGGDAALALLLLDRL

SEQ ID NO: 142 - protein, 16 aa, SARS-CoV-2
DAALALLLLDRLNQLE

SEQ ID NO: 143 - protein, 16 aa, SARS-CoV-2
NKKFLPFQQFGRDIAD

SEQ ID NO: 144 - protein, 16 aa, SARS-CoV-2
KFLPFQQFGRDIADTT

SEQ ID NO: 145 - protein, 16 aa, SARS-CoV-2
FLPFQQFGRDIADTTD

SEQ ID NO: 146 - protein, 16 aa, SARS-CoV-2
DIADTTDAVRDPQTLE

SEQ ID NO: 147 - protein, 16 aa, SARS-CoV-2
CDIKDLPKEITVATSR

SEQ ID NO: 148 - protein, 16 aa, SARS-CoV-2
GASQRVAGDSGFAAYS

SEQ ID NO: 149 - protein, 16 aa, SARS-CoV-2
NAPRITFGGPSDSTGS

SEQ ID NO: 150 - protein, 16 aa, SARS-CoV-2
MAGNGGDAALALLLLD

SEQ ID NO: 151 - protein, 16 aa, SARS-CoV-2
PPIKDFGGFNFSQILP

SEQ ID NO: 152 - protein, 16 aa, SARS-CoV-2
PIKDFGGFNFSQILPD

SEQ ID NO: 153 - protein, 16 aa, SARS-CoV-2
CKFDEDDSEPVLKGVK

SEQ ID NO: 154 - protein, 16 aa, SARS-CoV-2
ASQRVAGDSGFAAYSR

SEQ ID NO: 155 - protein, 16 aa, SARS-CoV-2
QRVAGDSGFAAYSRYR

SEQ ID NO: 156 - protein, 16 aa, SARS-CoV-2
HADQLTPTWRVYSTGS

SEQ ID NO: 157 - protein, 16 aa, SARS-CoV-2
FDEDDSEPVLKGVKLH

SEQ ID NO: 158 - protein, 16 aa, SARS-CoV-2
SCGSCCKFDEDDSEPV

SEQ ID NO: 159 - protein, 16 aa, SARS-CoV-2
SKPSKRSFIEDLLFNK

SEQ ID NO: 160 - protein, 16 aa, SARS-CoV-2
PSKRSFIEDLLFNKVT

SEQ ID NO: 161 - protein, 16 aa, SARS-CoV-2
TLLPAADLDDFSKQLQ

SEQ ID NO: 162 - protein, 16 aa, SARS-CoV-2
LLPAADLDDFSKQLQQ

SEQ ID NO: 163 - protein, 16 aa, SARS-CoV-2
TESNKKFLPFQQFGRD

SEQ ID NO: 164 - protein, 16 aa, SARS-CoV-2
IYKTPPIKDFGGFNFS

SEQ ID NO: 165 - protein, 16 aa, SARS-CoV-2
IKDFGGFNFSQILPDP

SEQ ID NO: 166 - protein, 16 aa, SARS-CoV-2
SKRSFIEDLLFNKVTL

SEQ ID NO: 167 - protein, 16 aa, SARS-CoV-2
QRNAPRITFGGPSDST

SEQ ID NO: 168 - protein, 16 aa, SARS-CoV-2
RNAPRITFGGPSDSTG

SEQ ID NO: 169 - protein, 16 aa, SARS-CoV-2
KKQQTVTLLPAADLDD

SEQ ID NO: 170 - protein, 16 aa, SARS-CoV-2
LPFQQFGRDIADTTDA

SEQ ID NO: 171 - protein, 16 aa, SARS-CoV-2
IADTTDAVRDPQTLEI

SEQ ID NO: 172 - protein, 16 aa, SARS-CoV-2
LQPELDSFKEELDKYF

SEQ ID NO: 173 - protein, 16 aa, SARS-CoV-2
PELDSFKEELDKYFKN

SEQ ID NO: 174 - protein, 16 aa, SARS-CoV-2
PAADLDDFSKQLQQSM

SEQ ID NO: 175 - protein, 16 aa, SARS-CoV-2
PFQQFGRDIADTTDAV

SEQ ID NO: 176 - protein, 16 aa, SARS-CoV-2
IIAYTMSLGAENSVAY

SEQ ID NO: 177 - protein, 16 aa, SARS-CoV-2
YKTPPIKDFGGFNFSQ

SEQ ID NO: 178 - protein, 16 aa, SARS-CoV-2
AGNGGDAALALLLLDR

SEQ ID NO: 179 - protein, 16 aa, SARS-CoV-2
AGDSGFAAYSRYRIGN

SEQ ID NO: 180 - protein, 16 aa, SARS-CoV-2
GTITVEELKKLLEQWN

SEQ ID NO: 181 - protein, 16 aa, SARS-CoV-2
LPAADLDDFSKQLQQS

SEQ ID NO: 182 - protein, 16 aa, SARS-CoV-2
ITREEAIRHVRAWIGF

SEQ ID NO: 183 - protein, 16 aa, SARS-CoV-2
TGVLTESNKKFLPFQQ

SEQ ID NO: 184 - protein, 16 aa, SARS-CoV-2
SVASQSIIAYTMSLGA

SEQ ID NO: 185 - protein, 16 aa, SARS-CoV-2
ASQSIIAYTMSLGAEN

SEQ ID NO: 186 - protein, 16 aa, SARS-CoV-2
TPPIKDFGGFNFSQIL

SEQ ID NO: 187 - protein, 16 aa, SARS-CoV-2
QPELDSFKEELDKYFK

SEQ ID NO: 188 - protein, 16 aa, SARS-CoV-2
ELDSFKEELDKYFKNH

SEQ ID NO: 189 - protein, 16 aa, SARS-CoV-2
LLLLDRLNQLESKMSG

SEQ ID NO: 190 - protein, 16 aa, SARS-CoV-2
VAIHADQLTPTWRVYS

SEQ ID NO: 191 - protein, 16 aa, SARS-CoV-2
KTPPIKDFGGFNFSQI

SEQ ID NO: 192 - protein, 16 aa, SARS-CoV-2
HLGRCDIKDLPKEITV

SEQ ID NO: 193 - protein, 16 aa, SARS-CoV-2
GRCDIKDLPKEITVAT

SEQ ID NO: 194 - protein, 16 aa, SARS-CoV-2
SKQRRPQGLPNNTASW

SEQ ID NO: 195 - protein, 16 aa, SARS-CoV-2
SAAEASKKPRQKRTAT

SEQ ID NO: 196 - protein, 16 aa, SARS-CoV-2
DLDDFSKQLQQSMSSA

SEQ ID NO: 197 - protein, 12 aa, SARS-CoV-2
SSSSDNIALLVQ

SEQ ID NO: 198 - protein, 16 aa, SARS-CoV-2
VAGDSGFAAYSRYRIG

SEQ ID NO: 199 - protein, 16 aa, SARS-CoV-2
GDSGFAAYSRYRIGNY

SEQ ID NO: 200 - protein, 16 aa, SARS-CoV-2
QNQRNAPRITFGGPSD

SEQ ID NO: 201 - protein, 16 aa, SARS-CoV-2
ADSNGTITVEELKKLL

SEQ ID NO: 202 - protein, 16 aa, SARS-CoV-2
AADLDDFSKQLQQSMS

SEQ ID NO: 203 - protein, 16 aa, SARS-CoV-2
SNKKFLPFQQFGRDIA

SEQ ID NO: 204 - protein, 16 aa, SARS-CoV-2
IAYTMSLGAENSVAYS

SEQ ID NO: 205 - protein, 16 aa, SARS-CoV-2
RCDIKDLPKEITVATS

SEQ ID NO: 206 - protein, 16 aa, SARS-CoV-2
AAIVLQLPQGTTLPKG

SEQ ID NO: 207 - protein, 16 aa, SARS-CoV-2
LPQGTTLPKGFYAEGS

SEQ ID NO: 208 - protein, 16 aa, SARS-CoV-2
LALLLLDRLNQLESKM

SEQ ID NO: 209 - protein, 16 aa, SARS-CoV-2
SQSIIAYTMSLGAENS

SEQ ID NO: 210 - protein, 16 aa, SARS-CoV-2
HHLGRCDIKDLPKEIT

SEQ ID NO: 211 - protein, 16 aa, SARS-CoV-2
KLNTDHSSSSDNIALL

SEQ ID NO: 212 - protein, 16 aa, SARS-CoV-2
RITFGGPSDSTGSNQN

SEQ ID NO: 213 - protein, 16 aa, SARS-CoV-2
ARMAGNGGDAALALLL

SEQ ID NO: 214 - protein, 15 aa, SARS-CoV-2
TDHSSSSDNIALLVQ

SEQ ID NO: 215 - protein, 16 aa, SARS-CoV-2
APRITFGGPSDSTGSN

SEQ ID NO: 216 - protein, 16 aa, SARS-CoV-2
GARSKQRRPQGLPNNT

SEQ ID NO: 217 - protein, 16 aa, SARS-CoV-2
NAAIVLQLPQGTTLPK

SEQ ID NO: 218 - protein, 16 aa, SARS-CoV-2
FQQFGRDIADTTDAVR

SEQ ID NO: 219 - protein, 16 aa, SARS-CoV-2
DQLTPTWRVYSTGSNV

SEQ ID NO: 220 - protein, 16 aa, SARS-CoV-2
VNCTEVPVAIHADQLT

SEQ ID NO: 221 - protein, 16 aa, SARS-CoV-2
SFIEDLLFNKVTLADA

SEQ ID NO: 222 - protein, 16 aa, SARS-CoV-2
STASALGKLQDVVNQN

SEQ ID NO: 223 - protein, 16 aa, SARS-CoV-2
QLPQGTTLPKGFYAEG

SEQ ID NO: 224 - protein, 16 aa, SARS-CoV-2
ALALLLLDRLNQLESK

SEQ ID NO: 225 - protein, 16 aa, SARS-CoV-2
LDDFSKQLQQSMSSAD

SEQ ID NO: 226 - protein, 16 aa, SARS-CoV-2
IHADQLTPTWRVYSTG

SEQ ID NO: 227 - protein, 16 aa, SARS-CoV-2
RSFIEDLLFNKVTLAD

SEQ ID NO: 228 - protein, 14 aa, SARS-CoV-2
DSEPVLKGVKLHYT

SEQ ID NO: 229 - protein, 16 aa, SARS-CoV-2
LLDRLNQLESKMSGKG

SEQ ID NO: 230 - protein, 16 aa, SARS-CoV-2
QSIIAYTMSLGAENSV

SEQ ID NO: 231 - protein, 16 aa, SARS-CoV-2
PLQPELDSFKEELDKY

SEQ ID NO: 232 - protein, 16 aa, SARS-CoV-2
AIVLQLPQGTTLPKGF

SEQ ID NO: 233 - protein, 16 aa, SARS-CoV-2
VLQLPQGTTLPKGFYA

SEQ ID NO: 234 - protein, 16 aa, SARS-CoV-2
LLLDRLNQLESKMSGK

SEQ ID NO: 235 - protein, 16 aa, SARS-CoV-2
NTDHSSSSDNIALLVQ

SEQ ID NO: 236 - protein, 16 aa, SARS-CoV-2
PVMEPIYDEPTTTTSV

SEQ ID NO: 237 - protein, 16 aa, SARS-CoV-2
LNTDHSSSSDNIALLV

SEQ ID NO: 238 - protein, 13 aa, SARS-CoV-2
HSSSSDNIALLVQ

SEQ ID NO: 239 - protein, 16 aa, SARS-CoV-2
SGARSKQRRPQGLPNN

SEQ ID NO: 240 - protein, 16 aa, SARS-CoV-2
PVAIHADQLTPTWRVY

SEQ ID NO: 241 - protein, 16 aa, SARS-CoV-2
CSCGSCCKFDEDDSEP

SEQ ID NO: 242 - protein, 16 aa, SARS-CoV-2
DCALDPLSETKCTLKS

SEQ ID NO: 243 - protein, 16 aa, SARS-CoV-2
KTVGELGDVRETMSYL

SEQ ID NO: 244 - protein, 16 aa, SARS-CoV-2
GVLTESNKKFLPFQQF

SEQ ID NO: 245 - protein, 16 aa, SARS-CoV-2
NQRNAPRITFGGPSDS

SEQ ID NO: 246 - protein, 16 aa, SARS-CoV-2
ITISSFKWDLTAFGLV

SEQ ID NO: 247 - protein, 16 aa, SARS-CoV-2
VASQSIIAYTMSLGAE

SEQ ID NO: 248 - protein, 16 aa, SARS-CoV-2
LQLPQGTTLPKGFYAE

SEQ ID NO: 249 - protein, 16 aa, SARS-CoV-2
RMAGNGGDAALALLLL

SEQ ID NO: 250 - protein, 16 aa, SARS-CoV-2
QQFGRDIADTTDAVRD

SEQ ID NO: 251 - protein, 16 aa, SARS-CoV-2
EVPVAIHADQLTPTWR

SEQ ID NO: 252 - protein, 16 aa, SARS-CoV-2
YFKNHTSPDVDLGDIS

SEQ ID NO: 253 - protein, 16 aa, SARS-CoV-2
EDDSEPVLKGVKLHYT

SEQ ID NO: 254 - protein, 15 aa, SARS-CoV-2
DDSEPVLKGVKLHYT

SEQ ID NO: 255 - protein, 16 aa, SARS-CoV-2
IVLQLPQGTTLPKGFY

SEQ ID NO: 256 - protein, 16 aa, SARS-CoV-2
FSRVSAKPPPGDQFKH

SEQ ID NO: 257 - protein, 16 aa, SARS-CoV-2
DPSKPSKRSFIEDLLF

SEQ ID NO: 258 - protein, 16 aa, SARS-CoV-2
KNHTSPDVDLGDISGI

SEQ ID NO: 259 - protein, 16 aa, SARS-CoV-2
NCTEVPVAIHADQLTP

SEQ ID NO: 260 - protein, 16 aa, SARS-CoV-2
TTLEETKFLTENLLLY

SEQ ID NO: 261 - protein, 16 aa, SARS-CoV-2
FKNHTSPDVDLGDISG

SEQ ID NO: 262 - protein, 16 aa, SARS-CoV-2
SFKEELDKYFKNHTSP

SEQ ID NO: 263 - protein, 16 aa, SARS-CoV-2
ITFDNLKTLLSLREVR

SEQ ID NO: 264 - protein, 16 aa, SARS-CoV-2
VDCALDPLSETKCTLK

SEQ ID NO: 265 - protein, 16 aa, SARS-CoV-2
TPTWRVYSTGSNVFQT

SEQ ID NO: 266 - protein, 16 aa, SARS-CoV-2
LGRCDIKDLPKEITVA

SEQ ID NO: 267 - protein, 16 aa, SARS-CoV-2
ITFGGPSDSTGSNQNG

SEQ ID NO: 268 - protein, 16 aa, SARS-CoV-2
DDFSKQLQQSMSSADS

SEQ ID NO: 269 - protein, 16 aa, SARS-CoV-2
FKEELDKYFKNHTSPD

SEQ ID NO: 270 - protein, 16 aa, SARS-CoV-2
RSGARSKQRRPQGLPN

SEQ ID NO: 271 - protein, 16 aa, SARS-CoV-2
DETQALPQRQKKQQTV

SEQ ID NO: 272 - protein, 14 aa, SARS-CoV-2
DHSSSSDNIALLVQ

SEQ ID NO: 273 - protein, 16 aa, SARS-CoV-2
GERSGARSKQRRPQGL

SEQ ID NO: 274 - protein, 16 aa, SARS-CoV-2
GDEVRQIAPGQTGKIA

SEQ ID NO: 275 - protein, 16 aa, SARS-CoV-2
PDPSKPSKRSFIEDLL

SEQ ID NO: 276 - protein, 16 aa, SARS-CoV-2
MADSNGTITVEELKKL

SEQ ID NO: 277 - protein, 16 aa, SARS-CoV-2
VNNSYECDIPIGAGIC

SEQ ID NO: 278 - protein, 16 aa, SARS-CoV-2
NNSYECDIPIGAGICA

SEQ ID NO: 279 - protein, 16 aa, SARS-CoV-2
NHTSPDVDLGDISGIN

SEQ ID NO: 280 - protein, 16 aa, SARS-CoV-2
VLTESNKKFLPFQQFG

SEQ ID NO: 281 - protein, 16 aa, SARS-CoV-2
VMEPIYDEPTTTTSVP

SEQ ID NO: 282 - protein, 16 aa, SARS-CoV-2
ESKMSGKGQQQQGQTV

SEQ ID NO: 283 - protein, 16 aa, SARS-CoV-2
GSNVFQTRAGCLIGAE

SEQ ID NO: 284 - protein, 16 aa, SARS-CoV-2
PSKPSKRSFIEDLLFN

SEQ ID NO: 285 - protein, 16 aa, SARS-CoV-2
RVAGDSGFAAYSRYRI

SEQ ID NO: 286 - protein, 16 aa, SARS-CoV-2
NGERSGARSKQRRPQG

SEQ ID NO: 287 - protein, 16 aa, SARS-CoV-2
ARSKQRRPQGLPNNTA

SEQ ID NO: 288 - protein, 16 aa, SARS-CoV-2
KMSGKGQQQQGQTVTK

SEQ ID NO: 289 - protein, 16 aa, SARS-CoV-2
ADLDDFSKQLQQSMSS

SEQ ID NO: 290 - protein, 16 aa, SARS-CoV-2
ERSGARSKQRRPQGLP

SEQ ID NO: 291 - protein, 16 aa, SARS-CoV-2
KQRRPQGLPNNTASWF

SEQ ID NO: 292 - protein, 16 aa, SARS-CoV-2
PQGTTLPKGFYAEGSR

SEQ ID NO: 293 - protein, 16 aa, SARS-CoV-2
AALALLLLDRLNQLES

SEQ ID NO: 294 - protein, 16 aa, SARS-CoV-2
VVNPVMEPIYDEPTTT

SEQ ID NO: 295 - protein, 12 aa, SARS-CoV-2
EPVLKGVKLHYT

SEQ ID NO: 296 - protein, 16 aa, SARS-CoV-2
SIIAYTMSLGAENSVA

SEQ ID NO: 297 - protein, 16 aa, SARS-CoV-2
TVAAFHQECSLQSCTQ

SEQ ID NO: 298 - protein, 16 aa, SARS-CoV-2
SKSPIQYIDIGNYTVS

SEQ ID NO: 299 - protein, 16 aa, SARS-CoV-2
DFSRVSAKPPPGDQFK

SEQ ID NO: 300 - protein, 16 aa, SARS-CoV-2
YSTGSNVFQTRAGCLI

SEQ ID NO: 301 - protein, 16 aa, SARS-CoV-2
KEELDKYFKNHTSPDV

SEQ ID NO: 302 - protein, 16 aa, SARS-CoV-2
LCVDEAGSKSPIQYID

SEQ ID NO: 303 - protein, 16 aa, SARS-CoV-2
RSKQRRPQGLPNNTAS

SEQ ID NO: 304 - protein, 16 aa, SARS-CoV-2
QGQTVTKKSAAEASKK

SEQ ID NO: 305 - protein, 16 aa, SARS-CoV-2
GQTVTKKSAAEASKKP

SEQ ID NO: 306 - protein, 16 aa, SARS-CoV-2
DPQTLEILDITPCSFG

SEQ ID NO: 307 - protein, 16 aa, SARS-CoV-2
DVNCTEVPVAIHADQL

SEQ ID NO: 308 - protein, 16 aa, SARS-CoV-2
MEPIYDEPTTTTSVPL

SEQ ID NO: 309 - protein, 16 aa, SARS-CoV-2
AAYSRYRIGNYKLNTD

SEQ ID NO: 310 - protein, 16 aa, SARS-CoV-2
CTEVPVAIHADQLTPT

SEQ ID NO: 311 - protein, 16 aa, SARS-CoV-2
SGVVNPVMEPIYDEPT

SEQ ID NO: 312 - protein, 16 aa, SARS-CoV-2
QGTTLPKGFYAEGSRG

SEQ ID NO: 313 - protein, 16 aa, SARS-CoV-2
TVTKKSAAEASKKPRQ

SEQ ID NO: 314 - protein, 16 aa, SARS-CoV-2
GVVNPVMEPIYDEPTT

SEQ ID NO: 315 - protein, 16 aa, SARS-CoV-2
VNPVMEPIYDEPTTTT

SEQ ID NO: 316 - protein, 16 aa, SARS-CoV-2
IAPGQTGKIADYNYKL

SEQ ID NO: 317 - protein, 16 aa, SARS-CoV-2
FIEDLLFNKVTLADAG

SEQ ID NO: 318 - protein, 16 aa, SARS-CoV-2
EAGLPYGANKDGIIWV

SEQ ID NO: 319 - protein, 16 aa, SARS-CoV-2
AGLPYGANKDGIIWVA

SEQ ID NO: 320 - protein, 16 aa, SARS-CoV-2
LESKMSGKGQQQQGQT

SEQ ID NO: 321 - protein, 16 aa, SARS-CoV-2
SGKGQQQQGQTVTKKS

SEQ ID NO: 322 - protein, 16 aa, SARS-CoV-2
DDKDPNFKDQVILLNK

SEQ ID NO: 323 - protein, 16 aa, SARS-CoV-2
VDLGDISGINASVVNI

SEQ ID NO: 324 - protein, 16 aa, SARS-CoV-2
ALPQRQKKQQTVTLLP

SEQ ID NO: 325 - protein, 16 aa, SARS-CoV-2
LPQRQKKQQTVTLLPA

SEQ ID NO: 326 - protein, 16 aa, SARS-CoV-2
IAARDLICAQKFNGLT

SEQ ID NO: 327 - protein, 16 aa, SARS-CoV-2
LDSFKEELDKYFKNHT

SEQ ID NO: 328 - protein, 16 aa, SARS-CoV-2
DSFKEELDKYFKNHTS

SEQ ID NO: 329 - protein, 16 aa, SARS-CoV-2
HTSPDVDLGDISGINA

SEQ ID NO: 330 - protein, 16 aa, SARS-CoV-2
GHHLGRCDIKDLPKEI

SEQ ID NO: 331 - protein, 16 aa, SARS-CoV-2
LDDKDPNFKDQVILLN

SEQ ID NO: 332 - protein, 16 aa, SARS-CoV-2
DSGFAAYSRYRIGNYK

SEQ ID NO: 333 - protein, 16 aa, SARS-CoV-2
VPVAIHADQLTPTWRV

SEQ ID NO: 334 - protein, 16 aa, SARS-CoV-2
TQLNRALTGIAVEQDK

SEQ ID NO: 335 - protein, 16 aa, SARS-CoV-2
CVDEAGSKSPIQYIDI

SEQ ID NO: 336 - protein, 16 aa, SARS-CoV-2
IRGGDGKMKDLSPRWY

SEQ ID NO: 337 - protein, 16 aa, SARS-CoV-2
TTTLEETKFLTENLLL

SEQ ID NO: 338 - protein, 16 aa, SARS-CoV-2
KDEDDNLIDSYFVVKR

SEQ ID NO: 339 - protein, 16 aa, SARS-CoV-2
VDEAGSKSPIQYIDIG

SEQ ID NO: 340 - protein, 16 aa, SARS-CoV-2
EVRQIAPGQTGKIADY

SEQ ID NO: 341 - protein, 16 aa, SARS-CoV-2
SPDVDLGDISGINASV

SEQ ID NO: 342 - protein, 16 aa, SARS-CoV-2
NKDGIIWVATEGALNT

SEQ ID NO: 343 - protein, 16 aa, SARS-CoV-2
DEVRQIAPGQTGKIAD

SEQ ID NO: 344 - protein, 16 aa, SARS-CoV-2
AYTMSLGAENSVAYSN

SEQ ID NO: 345 - protein, 16 aa, SARS-CoV-2
GGFNFSQILPDPSKPS

SEQ ID NO: 346 - protein, 16 aa, SARS-CoV-2
PDVDLGDISGINASVV

SEQ ID NO: 347 - protein, 16 aa, SARS-CoV-2
NPVMEPIYDEPTTTTS

SEQ ID NO: 348 - protein, 16 aa, SARS-CoV-2
GSKSPIQYIDIGNYTV

SEQ ID NO: 349 - protein, 16 aa, SARS-CoV-2
KSPIQYIDIGNYTVSC

SEQ ID NO: 350 - protein, 16 aa, SARS-CoV-2
MSGKGQQQQGQTVTKK

SEQ ID NO: 351 - protein, 16 aa, SARS-CoV-2
QTVTKKSAAEASKKPR

SEQ ID NO: 352 - protein, 16 aa, SARS-CoV-2
HIDAYKTFPPTEPKKD

SEQ ID NO: 353 - protein, 16 aa, SARS-CoV-2
TEVPVAIHADQLTPTW

SEQ ID NO: 354 - protein, 16 aa, SARS-CoV-2
NNAAIVLQLPQGTTLP

SEQ ID NO: 355 - protein, 16 aa, SARS-CoV-2
SKMSGKGQQQQGQTVT

SEQ ID NO: 356 - protein, 16 aa, SARS-CoV-2
TGIAVEQDKNTQEVFA

SEQ ID NO: 357 - protein, 16 aa, SARS-CoV-2
STGSNVFQTRAGCLIG

SEQ ID NO: 358 - protein, 16 aa, SARS-CoV-2
PYGANKDGIIWVATEG

SEQ ID NO: 359 - protein, 16 aa, SARS-CoV-2
PTWRVYSTGSNVFQTR

SEQ ID NO: 360 - protein, 16 aa, SARS-CoV-2
QTRAGCLIGAEHVNNS

SEQ ID NO: 361 - protein, 16 aa, SARS-CoV-2
DFGGFNFSQILPDPSK

SEQ ID NO: 362 - protein, 16 aa, SARS-CoV-2
SSGVVNPVMEPIYDEP

SEQ ID NO: 363 - protein, 16 aa, SARS-CoV-2
RQKKQQTVTLLPAADL

SEQ ID NO: 364 - protein, 13 aa, SARS-CoV-2
SEPVLKGVKLHYT

SEQ ID NO: 365 - protein, 16 aa, SARS-CoV-2
ETQALPQRQKKQQTVT

SEQ ID NO: 366 - protein, 16 aa, SARS-CoV-2
QRQKKQQTVTLLPAAD

SEQ ID NO: 367 - protein, 16 aa, SARS-CoV-2
KCVNFNFNGLTGTGVL

SEQ ID NO: 368 - protein, 16 aa, SARS-CoV-2
VKQIYKTPPIKDFGGF

SEQ ID NO: 369 - protein, 15 aa, SARS-CoV-2
EPIYDEPTTTTSVPL

SEQ ID NO: 370 - protein, 16 aa, SARS-CoV-2
AGHHLGRCDIKDLPKE

SEQ ID NO: 371 - protein, 16 aa, SARS-CoV-2
EAGSKSPIQYIDIGNY

SEQ ID NO: 372 - protein, 16 aa, SARS-CoV-2
QNGERSGARSKQRRPQ

SEQ ID NO: 373 - protein, 16 aa, SARS-CoV-2
IVDEPEEHVQIHTIDG

SEQ ID NO: 374 - protein, 16 aa, SARS-CoV-2
VTTTLEETKFLTENLL

SEQ ID NO: 375 - protein, 16 aa, SARS-CoV-2
LNQLESKMSGKGQQQQ

SEQ ID NO: 376 - protein, 16 aa, SARS-CoV-2
QALPQRQKKQQTVTLL

SEQ ID NO: 377 - protein, 16 aa, SARS-CoV-2
LTLQQIELKFNPPALQ

SEQ ID NO: 378 - protein, 16 aa, SARS-CoV-2
AEVAVKMFDAYVNTFS

SEQ ID NO: 379 - protein, 16 aa, SARS-CoV-2
GANKDGIIWVATEGAL

SEQ ID NO: 380 - protein, 16 aa, SARS-CoV-2
SRYRIGNYKLNTDHSS

SEQ ID NO: 381 - protein, 16 aa, SARS-CoV-2
KSAAEASKKPRQKRTA

SEQ ID NO: 382 - protein, 16 aa, SARS-CoV-2
QLTPTWRVYSTGSNVF

SEQ ID NO: 383 - protein, 16 aa, SARS-CoV-2
SYYKLGASQRVAGDSG

SEQ ID NO: 384 - protein, 16 aa, SARS-CoV-2
YKLGASQRVAGDSGFA

SEQ ID NO: 385 - protein, 16 aa, SARS-CoV-2
QDVNCTEVPVAIHADQ

SEQ ID NO: 386 - protein, 16 aa, SARS-CoV-2
NIQKEIDRLNEVAKNL

SEQ ID NO: 387 - protein, 16 aa, SARS-CoV-2
AIKLDDKDPNFKDQVI

SEQ ID NO: 388 - protein, 16 aa, SARS-CoV-2
YYKLGASQRVAGDSGF

SEQ ID NO: 389 - protein, 16 aa, SARS-CoV-2
KLDDKDPNFKDQVILL

SEQ ID NO: 390 - protein, 16 aa, SARS-CoV-2
RSVASQSIIAYTMSLG

SEQ ID NO: 391 - protein, 16 aa, SARS-CoV-2
LTPTWRVYSTGSNVFQ

SEQ ID NO: 392 - protein, 16 aa, SARS-CoV-2
PEAGLPYGANKDGIIW

SEQ ID NO: 393 - protein, 16 aa, SARS-CoV-2
AAEASKKPRQKRTATK

SEQ ID NO: 394 - protein, 16 aa, SARS-CoV-2
TGSNVFQTRAGCLIGA

SEQ ID NO: 395 - protein, 16 aa, SARS-CoV-2
KQIYKTPPIKDFGGFN

SEQ ID NO: 396 - protein, 16 aa, SARS-CoV-2
AYSRYRIGNYKLNTDH

SEQ ID NO: 397 - protein, 16 aa, SARS-CoV-2
DEAGSKSPIQYIDIGN

SEQ ID NO: 398 - protein, 16 aa, SARS-CoV-2
ECDIPIGAGICASYQT

SEQ ID NO: 399 - protein, 16 aa, SARS-CoV-2
GIAVEQDKNTQEVFAQ

SEQ ID NO: 400 - protein, 16 aa, SARS-CoV-2
IAVEQDKNTQEVFAQV

SEQ ID NO: 401 - protein, 16 aa, SARS-CoV-2
NKCVNFNFNGLTGTGV

SEQ ID NO: 402 - protein, 16 aa, SARS-CoV-2
DKDPNFKDQVILLNKH

SEQ ID NO: 403 - protein, 16 aa, SARS-CoV-2
KDGIIWVATEGALNTP

SEQ ID NO: 404 - protein, 16 aa, SARS-CoV-2
FNFNGLTGTGVLTESN

SEQ ID NO: 405 - protein, 16 aa, SARS-CoV-2
TLSYYKLGASQRVAGD

SEQ ID NO: 406 - protein, 16 aa, SARS-CoV-2
ADETQALPQRQKKQQT

SEQ ID NO: 407 - protein, 16 aa, SARS-CoV-2
QILPDPSKPSKRSFIE

SEQ ID NO: 408 - protein, 16 aa, SARS-CoV-2
LLALHRSYLTPGDSSS

SEQ ID NO: 409 - protein, 16 aa, SARS-CoV-2
TTVDNINLHTQVVDMS

SEQ ID NO: 410 - protein, 16 aa, SARS-CoV-2
GFNFSQILPDPSKPSK

SEQ ID NO: 411 - protein, 16 aa, SARS-CoV-2
TQALPQRQKKQQTVTL

SEQ ID NO: 412 - protein, 16 aa, SARS-CoV-2
VYSTGSNVFQTRAGCL

SEQ ID NO: 413 - protein, 16 aa, SARS-CoV-2
LSYYKLGASQRVAGDS

SEQ ID NO: 414 - protein, 16 aa, SARS-CoV-2
ILPDPSKPSKRSFIED

SEQ ID NO: 415 - protein, 16 aa, SARS-CoV-2
LDGEVITFDNLKTLLS

SEQ ID NO: 416 - protein, 16 aa, SARS-CoV-2
FTVEKGIYQTSNFRVQ

SEQ ID NO: 417 - protein, 16 aa, SARS-CoV-2
NQLESKMSGKGQQQQG

SEQ ID NO: 418 - protein, 16 aa, SARS-CoV-2
YSRYRIGNYKLNTDHS

SEQ ID NO: 419 - protein, 16 aa, SARS-CoV-2
GLPYGANKDGIIWVAT

SEQ ID NO: 420 - protein, 16 aa, SARS-CoV-2
GFAAYSRYRIGNYKLN

SEQ ID NO: 421 - protein, 16 aa, SARS-CoV-2
VTIAEILLIIMRTFKV

SEQ ID NO: 422 - protein, 16 aa, SARS-CoV-2
FAAYSRYRIGNYKLNT

SEQ ID NO: 423 - protein, 16 aa, SARS-CoV-2
SGFAAYSRYRIGNYKL

SEQ ID NO: 424 - protein, 16 aa, SARS-CoV-2
KQGEIKDATPSDFVRA

SEQ ID NO: 425 - protein, 16 aa, SARS-CoV-2
GGDGKMKDLSPRWYFY

SEQ ID NO: 426 - protein, 16 aa, SARS-CoV-2
CCSCGSCCKFDEDDSE

SEQ ID NO: 427 - protein, 16 aa, SARS-CoV-2
KSAPLIELCVDEAGSK

SEQ ID NO: 428 - protein, 16 aa, SARS-CoV-2
KDATPSDFVRATATIP

SEQ ID NO: 429 - protein, 16 aa, SARS-CoV-2
GEIKDATPSDFVRATA

SEQ ID NO: 430 - protein, 16 aa, SARS-CoV-2
RRPQGLPNNTASWFTA

SEQ ID NO: 431 - protein, 16 aa, SARS-CoV-2
GDGKMKDLSPRWYFYY

SEQ ID NO: 432 - protein, 16 aa, SARS-CoV-2
SQPFLMDLEGKQGNFK

SEQ ID NO: 433 - protein, 16 aa, SARS-CoV-2
KIVDEPEEHVQIHTID

SEQ ID NO: 434 - protein, 16 aa, SARS-CoV-2
QRRPQGLPNNTASWFT

SEQ ID NO: 435 - protein, 16 aa, RaTG13 bat coronavirus
YTMADLVYALRHFDEG

SEQ ID NO: 436 - protein, 18 aa, RaTG13 bat coronavirus
VTTTLEETKFLTENLLLY

SEQ ID NO: 437 - protein, 16 aa, RaTG13 bat coronavirus
ITISSFKWDLTAFGLV

SEQ ID NO: 438 - protein, 17 aa, RaTG13 bat coronavirus
DFSRVSAKPPPGDQFKH

SEQ ID NO: 439 - protein, 16 aa, RaTG13 bat coronavirus
ITREEAVRHVRAWIGF

SEQ ID NO: 440 - protein, 16 aa, RaTG13 bat coronavirus
TVGELGDVRETMNYLF

SEQ ID NO: 441 - protein, 16 aa, RaTG13 bat coronavirus
KDEDDNLIDSYFVVKR

SEQ ID NO: 442 - protein, 16 aa, RaTG13 bat coronavirus
GDIILKPANDGLKITE

SEQ ID NO: 443 - protein, 16 aa, RaTG13 bat coronavirus
LTLQQIELKFNPPALQ

SEQ ID NO: 444 - protein, 16 aa, RaTG13 bat coronavirus
TTVDNINLHTQVVDMS

SEQ ID NO: 445 - protein, 26 aa, RaTG13 bat coronavirus
DIADTTDAVRDPQTLEILDITPCSFG

SEQ ID NO: 446 - protein, 27 aa, RaTG13 bat coronavirus
CCSCGSCCKFDEDDSEPVLKGVKLHYT

SEQ ID NO: 447 - protein, 26 aa, RaTG13 bat coronavirus
PDPSKPSKRSFIEDLLFNKVTLADAG

SEQ ID NO: 448 - protein, 26 aa, RaTG13 bat coronavirus
TESNKKFLPFQQFGRDIADTTDAVRD

SEQ ID NO: 449 - protein, 27 aa, RaTG13 bat coronavirus
VKQIYKTPPIKDFGGFNFSQILPDPSK

SEQ ID NO: 450 - protein, 25 aa, RaTG13 bat coronavirus
PLQPELDSFKEELDKYFKNHTSPDV

SEQ ID NO: 451 - protein, 23 aa, RaTG13 bat coronavirus
IHADQLTPTWRVYSTGSNVFQTR

SEQ ID NO: 452 - protein, 18 aa, RaTG13 bat coronavirus
TGVLTESNKKFLPFQQFG

SEQ ID NO: 453 - protein, 25 aa, RaTG13 bat coronavirus
RSVASQSIIAYTMSLGAENSVAYSN

SEQ ID NO: 454 - protein, 25 aa, RaTG13 bat coronavirus
QDVNCTEVPVAIHADQLTPTWRVYS

SEQ ID NO: 455 - protein, 20 aa, RaTG13 bat coronavirus
VYSTGSNVFQTRAGCLIGAE

SEQ ID NO: 456 - protein, 16 aa, RaTG13 bat coronavirus
STASALGKLQDVVNQN

SEQ ID NO: 457 - protein, 20 aa, RaTG13 bat coronavirus
YFKNHTSPDVDLGDISGINA

SEQ ID NO: 458 - protein, 19 aa, RaTG13 bat coronavirus
TGDEVRQIAPGQTGKIADY

SEQ ID NO: 459 - protein, 17 aa, RaTG13 bat coronavirus
NKCVNFNFNGLTGTGVL

SEQ ID NO: 460 - protein, 17 aa, RaTG13 bat coronavirus
GGFNFSQILPDPSKPSK

SEQ ID NO: 461 - protein, 17 aa, RaTG13 bat coronavirus
VDCALDPLSETKCTLKS

SEQ ID NO: 462 - protein, 16 aa, RaTG13 bat coronavirus
QTRAGCLIGAEHVNNS

SEQ ID NO: 463 - protein, 17 aa, RaTG13 bat coronavirus
VNNSYECDIPIGAGICA

SEQ ID NO: 464 - protein, 16 aa, RaTG13 bat coronavirus
FNFNGLTGTGVLTESN

SEQ ID NO: 465 - protein, 16 aa, RaTG13 bat coronavirus
IAARDLICAQKFNGLT

SEQ ID NO: 466 - protein, 17 aa, RaTG13 bat coronavirus
QILPDPSKPSKRSFIED

SEQ ID NO: 467 - protein, 16 aa, RaTG13 bat coronavirus
FTVEKGIYQTSNFRVQ

SEQ ID NO: 468 - protein, 16 aa, RaTG13 bat coronavirus
LLALHRSYLTPGDSSS

SEQ ID NO: 469 - protein, 18 aa, RaTG13 bat coronavirus
TGIAVEQDKNTQEVFAQV

SEQ ID NO: 470 - protein, 16 aa, RaTG13 bat coronavirus
VDLGDISGINASVVNI

SEQ ID NO: 471 - protein, 16 aa, RaTG13 bat coronavirus
SQPFLMDLEGKQGNFK

SEQ ID NO: 472 - protein, 16 aa, RaTG13 bat coronavirus
NIQKEIDRLNEVAKNL

SEQ ID NO: 473 - protein, 16 aa, RaTG13 bat coronavirus
ECDIPIGAGICASYQT

SEQ ID NO: 474 - protein, 16 aa, RaTG13 bat coronavirus
IAPGQTGKIADYNYKL

SEQ ID NO: 475 - protein, 17 aa, RaTG13 bat coronavirus
SPDVDLGDISGINASVV

SEQ ID NO: 476 - protein, 16 aa, RaTG13 bat coronavirus
TQLNRALTGIAVEQDK

SEQ ID NO: 477 - protein, 21 aa, RaTG13 bat coronavirus
SGVVNPAMEPIYDEPTTTTSV

SEQ ID NO: 478 - protein, 17 aa, RaTG13 bat coronavirus
KIVDEPEEHVQIHTIDG

SEQ ID NO: 479 - protein, 16 aa, RaTG13 bat coronavirus
MEPIYDEPTTTTSVPL

SEQ ID NO: 480 - protein, 23 aa, RaTG13 bat coronavirus
MADNGTITVEELKKLLEQWNLVI

SEQ ID NO: 481 - protein, 30 aa, RaTG13 bat coronavirus
LGASQRVAGDSGFAAYSRYRIGNYKLNTDH

SEQ ID NO: 482 - protein, 26 aa, RaTG13 bat coronavirus
AGHHLGRCDIKDLPKEITVATSRTLS

SEQ ID NO: 483 - protein, 18 aa, RaTG13 bat coronavirus
KLNTDHSSSSDNIALLVQ

SEQ ID NO: 484 - protein, 20 aa, RaTG13 bat coronavirus
TLSYYKLGASQRVAGDSGFA

SEQ ID NO: 485 - protein, 16 aa, RaTG13 bat coronavirus
VTIAEILLIIMRTFKV

SEQ ID NO: 486 - protein, 20 aa, RaTG13 bat coronavirus
EVGSKSPIQYIDIGNYTVSC

SEQ ID NO: 487 - protein, 17 aa, RaTG13 bat coronavirus
LCVDEVGSKSPIQYIDI

SEQ ID NO: 488 - protein, 29 aa, RaTG13 bat coronavirus
QRQKKQQTVTLLPAADLDDFSKQLQQSMS

SEQ ID NO: 489 - protein, 29 aa, RaTG13 bat coronavirus
MAGNGSDAALALLLLDRLNQLESKMSGKG

SEQ ID NO: 490 - protein, 18 aa, RaTG13 bat coronavirus
KSAAEASKKPRQKRTATK

SEQ ID NO: 491 - protein, 26 aa, RaTG13 bat coronavirus
GERSGARPKQRRPQGLPNNTASWFTA

SEQ ID NO: 492 - protein, 26 aa, RaTG13 bat coronavirus
NNAAIVLQLPQGTTLPKGFYAEGSRG

SEQ ID NO: 493 - protein, 17 aa, RaTG13 bat coronavirus
RITFGGPSDSTGSNQNG

SEQ ID NO: 494 - protein, 21 aa, RaTG13 bat coronavirus
QNQRNAPRITFGGPSDSTGSN

SEQ ID NO: 495 - protein, 19 aa, RaTG13 bat coronavirus
KLDDKDPNFKDQVILLNKH

SEQ ID NO: 496 - protein, 22 aa, RaTG13 bat coronavirus
ADETQALPQRQKKQQTVTLLPA

SEQ ID NO: 497 - protein, 16 aa, RaTG13 bat coronavirus
IRGGDGKMKDLSPRWY

SEQ ID NO: 498 - protein, 16 aa, RaTG13 bat coronavirus
HIDAYKTFPPTEPKKD

SEQ ID NO: 499 - protein, 17 aa, RaTG13 bat coronavirus
LNQLESKMSGKGQQQQS

SEQ ID NO: 500 - protein, 19 aa, RaTG13 bat coronavirus
PEAGLPYGANKDGIIWVAT

SEQ ID NO: 501 - protein, 19 aa, RaTG13 bat coronavirus
QSQTVTKKSAAEASKKPRQ

SEQ ID NO: 502 - protein, 20 aa, RaTG13 bat coronavirus
LESKMSGKGQQQQSQTVTKK

SEQ ID NO: 503 - protein, 17 aa, RaTG13 bat coronavirus
NKDGIIWVATEGALNTP

SEQ ID NO: 504 - protein, 17 aa, RaTG13 bat coronavirus
GGDGKMKDLSPRWYFYY

SEQ ID NO: 505 - protein, 16 aa, RaTG13 bat coronavirus
PYGANKDGIIWVATEG

SEQ ID NO: 506 - protein, 16 aa, RaTG13 bat coronavirus
GANKDGIIWVATEGAL

SEQ ID NO: 507 - protein, 16 aa, RaTG13 bat coronavirus
AIKLDDKDPNFKDQVI

SEQ ID NO: 508 - protein, 16 aa, RaTG13 bat coronavirus
QNGERSGARPKQRRPQ

SEQ ID NO: 509 - protein, 16 aa, Pangolin coronavirus
YTMADLVYALRHFDEG

SEQ ID NO: 510 - protein, 16 aa, Pangolin coronavirus
ITREEAIKHVRAWVGF

SEQ ID NO: 511 - protein, 19 aa, Pangolin coronavirus
VTTTLEETKFLTENLLLYA

SEQ ID NO: 512 - protein, 16 aa, Pangolin coronavirus
FSRVSAKPPPGDQFKH

SEQ ID NO: 513 - protein, 17 aa, Pangolin coronavirus
DGVVCTEIDPKLDGYYK

SEQ ID NO: 514 - protein, 16 aa, Pangolin coronavirus
KTVGELGDVRETMSHL

SEQ ID NO: 515 - protein, 16 aa, Pangolin coronavirus
CTASDTYACWHHSVGF

SEQ ID NO: 516 - protein, 16 aa, Pangolin coronavirus
AEVAVKMFDAYVNTFS

SEQ ID NO: 517 - protein, 16 aa, Pangolin coronavirus
FKKNAWNIGEPKSILS

SEQ ID NO: 518 - protein, 16 aa, Pangolin coronavirus
LTLQQIELKFNPPALQ

SEQ ID NO: 519 - protein, 16 aa, Pangolin coronavirus
TTVDNINLHTQVVDMS

SEQ ID NO: 520 - protein, 17 aa, Pangolin coronavirus
KNAWNIGEPKSILSPLY

SEQ ID NO: 521 - protein, 26 aa, Pangolin coronavirus
DISDTTDAVRDPQTLEILDITPCSFG

SEQ ID NO: 522 - protein, 27 aa, Pangolin coronavirus
CCSCGSCCKFDEDDSEPVLKGVKLHYT

SEQ ID NO: 523 - protein, 26 aa, Pangolin coronavirus
PDPSKPSKRSFIEDLLFNKVTLADAG

SEQ ID NO: 524 - protein, 29 aa, Pangolin coronavirus
TGVLTTSKKQFLPFQQFGRDISDTTDAVR

SEQ ID NO: 525 - protein, 27 aa, Pangolin coronavirus
VKQIYKTPPIKDFGGFNFLQILPDPSK

SEQ ID NO: 526 - protein, 25 aa, Pangolin coronavirus
PLQPELDSFKEELDKYFKNHTSPDV

SEQ ID NO: 527 - protein, 22 aa, Pangolin coronavirus
IHAEQLTPAWRVYSAGANVFQT

SEQ ID NO: 528 - protein, 24 aa, Pangolin coronavirus
SVNQRSIIAYTMSLGAENSVAYSN

SEQ ID NO: 529 - protein, 19 aa, Pangolin coronavirus
EVPMAIHAEQLTPAWRVYS

SEQ ID NO: 530 - protein, 16 aa, Pangolin coronavirus
STASALGKLQDVVNQN

SEQ ID NO: 531 - protein, 20 aa, Pangolin coronavirus
YFKNHTSPDVDLGDISGINA

SEQ ID NO: 532 - protein, 17 aa, Pangolin coronavirus
DKCVNFNFNGLTGTGVL

SEQ ID NO: 533 - protein, 16 aa, Pangolin coronavirus
GGFNFLQILPDPSKPS

SEQ ID NO: 534 - protein, 16 aa, Pangolin coronavirus
NNSYECDIPVGAGICA

SEQ ID NO: 535 - protein, 16 aa, Pangolin coronavirus
IAARDLICAQKFNGLT

SEQ ID NO: 536 - protein, 16 aa, Pangolin coronavirus
FNFLQILPDPSKPSKR

SEQ ID NO: 537 - protein, 19 aa, Pangolin coronavirus
FLQILPDPSKPSKRSFIED

SEQ ID NO: 538 - protein, 18 aa, Pangolin coronavirus
TGIAVEQDKNTQEVFAQV

SEQ ID NO: 539 - protein, 16 aa, Pangolin coronavirus
VDLGDISGINASVVNI

SEQ ID NO: 540 - protein, 16 aa, Pangolin coronavirus
SQPFLMDLEGKQGNFK

SEQ ID NO: 541 - protein, 16 aa, Pangolin coronavirus
NIQKEIDRLNEVAKNL

SEQ ID NO: 542 - protein, 16 aa, Pangolin coronavirus
LKSLTVEKGIYQTSNF

SEQ ID NO: 543 - protein, 16 aa, Pangolin coronavirus
KGIYQTSNFRVQPTIS

SEQ ID NO: 544 - protein, 17 aa, Pangolin coronavirus
SPDVDLGDISGINASVV

SEQ ID NO: 545 - protein, 16 aa, Pangolin coronavirus
TQLNRALTGIAVEQDK

SEQ ID NO: 546 - protein, 16 aa, Pangolin coronavirus
SRIVDEPEDHVQIHTI

SEQ ID NO: 547 - protein, 17 aa, Pangolin coronavirus
GVVNPAMDPIYDEPTTT

SEQ ID NO: 548 - protein, 24 aa, Pangolin coronavirus
MSANNGTITVEELKKLLEQWNLVI

SEQ ID NO: 549 - protein, 30 aa, Pangolin coronavirus; identical to SEQ ID NO: 481

SEQ ID NO: 550 - protein, 26 aa, Pangolin coronavirus
AGHHLGRCDIKDLPKEITVATSRTLS

SEQ ID NO: 551 - protein, 20 aa, Pangolin coronavirus
TLSYYKLGASQRVAGDSGFA

SEQ ID NO: 552 - protein, 29 aa, Pangolin coronavirus
QRQKKQQTVTLLPAADLDDFSKQLQQSMS

SEQ ID NO: 553 - protein, 30 aa, Pangolin coronavirus
ARIAGNGGDAALALLLLDRLNALESKMSGK

SEQ ID NO: 554 - protein, 18 aa, Pangolin coronavirus
KSAAEASKKPRQKRTATK

SEQ ID NO: 555 - protein, 26 aa, Pangolin coronavirus
GDRSGARPKQRRPQGLPNNTASWFTA

SEQ ID NO: 556 - protein, 23 aa, Pangolin coronavirus
GPQARAPRITFGGPSDSTDNNQN

SEQ ID NO: 557 - protein, 23 aa, Pangolin coronavirus
NAAIVLQLPQGTALPKGFYAEGS

SEQ ID NO: 558 - protein, 16 aa, Pangolin coronavirus
VRGGDGKMKDLSPRWY

SEQ ID NO: 559 - protein, 18 aa, Pangolin coronavirus
QPLPQRQKKQQTVTLLPA

SEQ ID NO: 560 - protein, 16 aa, Pangolin coronavirus
HIDAYKTFPPTEPKKD

SEQ ID NO: 561 - protein, 19 aa, Pangolin coronavirus
QSQTVTKKSAAEASKKPRQ

SEQ ID NO: 562 - protein, 22 aa, Pangolin coronavirus
LNALESKMSGKGSQQQSQTVTK

SEQ ID NO: 563 - protein, 17 aa, Pangolin coronavirus
GGDGKMKDLSPRWYFYY

SEQ ID NO: 564 - protein, 16 aa, Pangolin coronavirus
KLDDKDPSFKDNVILL

SEQ ID NO: 565 - protein, 16 aa, Pangolin coronavirus
QGTALPKGFYAEGSRG

SEQ ID NO: 566 - protein, 16 aa, Pangolin coronavirus
EGIIWVATEGALNTPK

SEQ ID NO: 567 - protein, 17 aa, Pangolin coronavirus
DESQPLPQRQKKQQTVT

SEQ ID NO: 568 - protein, 17 aa, Pangolin coronavirus
DDKDPSFKDNVILLNKH

SEQ ID NO: 569 - protein, 16 aa, SARS-CoV
YTMADLVYALRHFDEG

SEQ ID NO: 570 - protein, 16 aa, SARS-CoV
ITREEAIRHVRAWIGF

SEQ ID NO: 571 - protein, 16 aa, SARS-CoV
TTLEETKFLTNKLLLF

SEQ ID NO: 572 - protein, 16 aa, SARS-CoV
KTVGELGDVRETMTHL

SEQ ID NO: 573 - protein, 16 aa, SARS-CoV
GVLLSNFGAPSYCNGV

SEQ ID NO: 574 - protein, 27 aa, SARS-CoV
ACSCGSCCKFDEDDSEPVLKGVKLHYT

SEQ ID NO: 575 - protein, 26 aa, SARS-CoV
PDPLKPTKRSFIEDLLFNKVTLADAG

SEQ ID NO: 576 - protein, 25 aa, SARS-CoV
PLQPELDSFKEELDKYFKNHTSPDV

SEQ ID NO: 577 - protein, 25 aa, SARS-CoV
TPSSKRFQPFQQFGRDVSDFTDSVR

SEQ ID NO: 578 - protein, 19 aa, SARS-CoV
IHADQLTPAWRIYSTGNNV

SEQ ID NO: 579 - protein, 22 aa, SARS-CoV
STSQKSIVAYTMSLGADSSIAY

SEQ ID NO: 580 - protein, 25 aa, SARS-CoV
QDVNCTDVSTAIHADQLTPAWRIYS

SEQ ID NO: 581 - protein, 20 aa, SARS-CoV
YFKNHTSPDVDLGDISGINA

SEQ ID NO: 582 - protein, 17 aa, SARS-CoV
LKYFGGFNFSQILPDPL

SEQ ID NO: 583 - protein, 16 aa, SARS-CoV
ECDIPIGAGICASYHT

SEQ ID NO: 584 - protein, 16 aa, SARS-CoV
DTSYECDIPIGAGICA

SEQ ID NO: 585 - protein, 16 aa, SARS-CoV
VDLGDISGINASVVNI

SEQ ID NO: 586 - protein, 16 aa, SARS-CoV
NIQKEIDRLNEVAKNL

SEQ ID NO: 587 - protein, 17 aa, SARS-CoV
SPDVDLGDISGINASVV

SEQ ID NO: 588 - protein, 16 aa, SARS-CoV
SPASTVHATATIPLQA

SEQ ID NO: 589 - protein, 16 aa, SARS-CoV
GVANPAMDPIYDEPTT

SEQ ID NO: 590 - protein, 16 aa, SARS-CoV
ITVSQIQLSLLKVTAF

SEQ ID NO: 591 - protein, 23 aa, SARS-CoV
MADNGTITVEELKQLLEQWNLVI

SEQ ID NO: 592 - protein, 25 aa, SARS-CoV
GHSLGRCDIKDLPKEITVATSRTLS

SEQ ID NO: 593 - protein, 30 aa, SARS-CoV
LGASQRVGTDSGFAAYNRYRIGNYKLNTDH

SEQ ID NO: 594 - protein, 18 aa, SARS-CoV
KLNTDHAGSNDNIALLVQ

SEQ ID NO: 595 - protein, 20 aa, SARS-CoV
TLSYYKLGASQRVGTDSGFA

SEQ ID NO: 596 - protein, 27 aa, SARS-CoV
NGGRNGARPKQRRPQGLPNNTASWFTA

SEQ ID NO: 597 - protein, 18 aa, SARS-CoV
KSAAEASKKPRQKRTATK

SEQ ID NO: 598 - protein, 24 aa, SARS-CoV
GETALALLLLDRLNQLESKVSGKG

SEQ ID NO: 599 - protein, 25 aa, SARS-CoV
KKQPTVTLLPAADMDDFSRQLQNSM

SEQ ID NO: 600 - protein, 26 aa, SARS-CoV
NNAATVLQLPQGTTLPKGFYAEGSRG

SEQ ID NO: 601 - protein, 16 aa, SARS-CoV
HIDAYKTFPPTEPKKD

SEQ ID NO: 602 - protein, 20 aa, SARS-CoV
NQRSAPRITFGGPTDSTDNN

SEQ ID NO: 603 - protein, 17 aa, SARS-CoV
DMDDFSRQLQNSMSGAS

SEQ ID NO: 604 - protein, 16 aa, SARS-CoV
VRGGDGKMKELSPRWY

SEQ ID NO: 605 - protein, 17 aa, SARS-CoV
EGIVWVATEGALNTPKD

SEQ ID NO: 606 - protein, 19 aa, SARS-CoV
QGQTVTKKSAAEASKKPRQ

SEQ ID NO: 607 - protein, 19 aa, SARS-CoV
SKVSGKGQQQQGQTVTKKS

SEQ ID NO: 608 - protein, 16 aa, SARS-CoV
DDKDPQFKDNVILLNK

SEQ ID NO: 609 - protein, 16 aa, SARS-CoV
KLDDKDPQFKDNVILL

SEQ ID NO: 610 - protein, 16 aa, SARS-CoV
TDEAQPLPQRQKKQPT

SEQ ID NO: 611 - protein, 16 aa, SARS-CoV
SQASSRSSSRSRGNSR

SEQ ID NO: 612 - protein, 16 aa, SARS-CoV
GGDGKMKELSPRWYFY

SEQ ID NO: 613 - protein, 16 aa, SARS-CoV
LNQLESKVSGKGQQQQ

SEQ ID NO: 614 - protein, 16 aa, MERS-CoV
VAIEQLLYAIQQLYTG

SEQ ID NO: 615 - protein, 17 aa, MERS-CoV
VQTVEDLRARMTYVCQC

SEQ ID NO: 616 - protein, 16 aa, MERS-CoV
YTMMDLVYALRHFDQN

SEQ ID NO: 617 - protein, 16 aa, MERS-CoV
MTLDLLKDIKFVIPAL

SEQ ID NO: 618 - protein, 16 aa, MERS-CoV
LTVGDIFVLTSHSVAT

SEQ ID NO: 619 - protein, 16 aa, MERS-CoV
IVLGDAIQVAKCYGES

SEQ ID NO: 620 - protein, 17 aa, MERS-CoV
TVVGQLEQTNMHSPDVI

SEQ ID NO: 621 - protein, 16 aa, MERS-CoV
VTLDKLRDYLADYDVA

SEQ ID NO: 622 - protein, 16 aa, MERS-CoV
LSIEEFADVVKEQVSD

SEQ ID NO: 623 - protein, 16 aa, MERS-CoV
ITVPEEFASHVANFQK

SEQ ID NO: 624 - protein, 16 aa, MERS-CoV
VDSSQGSEYQYVIFCQ

SEQ ID NO: 625 - protein, 16 aa, MERS-CoV
LTIVDIPQSLTFSYDG

SEQ ID NO: 626 - protein, 16 aa, MERS-CoV
AASVNQIVLRNSNGAC

SEQ ID NO: 627 - protein, 16 aa, MERS-CoV
VETVVGQLEQTNMHSP

SEQ ID NO: 628 - protein, 25 aa, MERS-CoV
LGNSTGIDFQDELDEFFKNVSTSIP

SEQ ID NO: 629 - protein, 21 aa, MERS-CoV
GSRSARSAIEDLLFDKVTIAD

SEQ ID NO: 630 - protein, 19 aa, MERS-CoV
AISASIGDIIQRLDVLEQD

SEQ ID NO: 631 - protein, 16 aa, MERS-CoV
STGSRSARSAIEDLLF

SEQ ID NO: 632 - protein, 12 aa, MERS-CoV
ITADIELALLRA

SEQ ID NO: 633 - protein, 17 aa, MERS-CoV
RAVKDGIVWVHEDGATD

SEQ ID NO: 634 - protein, 16 aa, MERS-CoV
SRASSLSRNSSRSSSQ

SEQ ID NO: 635 - protein, 16 aa, HCoV-HKU1
SVASLSAPTLVPQENY

SEQ ID NO: 636 - protein, 16 aa, HCoV-HKU1
ITKDEAIKRVRGWVGF

SEQ ID NO: 637 - protein, 19 aa, HCoV-HKU1
LTQTFTSMLTNYFLDDVEM

SEQ ID NO: 638 - protein, 16 aa, HCoV-HKU1
VTLGDFTIMSGRMSLT

SEQ ID NO: 639 - protein, 16 aa, HCoV-HKU1
ITVEAAIELSKELKRP

SEQ ID NO: 640 - protein, 16 aa, HCoV-HKU1
VTVDDFVAVVCDAIEN

SEQ ID NO: 641 - protein, 16 aa, HCoV-HKU1
VTVDVLKDMPVLKTIN

SEQ ID NO: 642 - protein, 16 aa, HCoV-HKU1
VSIETLLAAIKRLYMG

SEQ ID NO: 643 - protein, 16 aa, HCoV-HKU1
LTVGEVFGKILGNVFC

SEQ ID NO: 644 - protein, 16 aa, HCoV-HKU1
KTVLGEYVFDKSELTN

SEQ ID NO: 645 - protein, 16 aa, HCoV-HKU1
ISVQELRYMNANGLRP

SEQ ID NO: 646 - protein, 16 aa, HCoV-HKU1
VATGDVVLASDDLYVK

SEQ ID NO: 647 - protein, 26 aa, HCoV-HKU1
PHCGSSSRSFFEDLLFDKVKLSDVGF

SEQ ID NO: 648 - protein, 16 aa, HCoV-HKU1
VTIDCSLFVCSNYAAC

SEQ ID NO: 649 - protein, 16 aa, HCoV-HKU1
LAVIGDFNCTNFAIND

SEQ ID NO: 650 - protein, 16 aa, HCoV-HKU1
SVPKLSDFESELSHWF

SEQ ID NO: 651 - protein, 19 aa, HCoV-HKU1
KLSDFESELSHWFKNQTSI

SEQ ID NO: 652 - protein, 16 aa, HCoV-HKU1
FGAALAMEKVNECVKS

SEQ ID NO: 653 - protein, 16 aa, HCoV-HKU1
YTLSDLPVYVTVAKVQ

SEQ ID NO: 654 - protein, 16 aa, HCoV-OC43
CSVEDFNVWALSNGFS

SEQ ID NO: 655 - protein, 16 aa, HCoV-OC43
ADSYYSYIMPMLTMCH

SEQ ID NO: 656 - protein, 16 aa, HCoV-OC43
ITVEAALDLSKELKRP

SEQ ID NO: 657 - protein, 16 aa, HCoV-OC43
ITKEEAVKRVRAWVGF

SEQ ID NO: 658 - protein, 17 aa, HCoV-OC43
ILLDDFVALVKSLNLNC

SEQ ID NO: 659 - protein, 16 aa, HCoV-OC43
ADSVVEVVTTSLTPCG

SEQ ID NO: 660 - protein, 16 aa, HCoV-OC43
VVVDDHVGLLDQAWRV

SEQ ID NO: 661 - protein, 16 aa, HCoV-OC43
TATGDVVLATDDLYVK

SEQ ID NO: 662 - protein, 16 aa, HCoV-OC43
ATIQEIVSERELILSW

SEQ ID NO: 663 - protein, 16 aa, HCoV-OC43
FAVRKEGQDVIFSQFD

SEQ ID NO: 664 - protein, 16 aa, HCoV-OC43
KTVLGEYVFDKSELTN

SEQ ID NO: 665 - protein, 16 aa, HCoV-OC43
ISVQELRYMNANGLRP

SEQ ID NO: 666 - protein, 16 aa, HCoV-OC43
NGKTVLGEYVFDKSEL

SEQ ID NO: 667 - protein, 16 aa, HCoV-OC43
CTIAQLTDAALSIKEN

SEQ ID NO: 668 - protein, 24 aa, HCoV-OC43
TSIPNLPDFKEELDQWFKNQTSVA

SEQ ID NO: 669 - protein, 24 aa, HCoV-OC43
ECSKASSRSAIEDLLFDKVKLSDV

SEQ ID NO: 670 - protein, 16 aa, HCoV-OC43
ITIDKFAIPNGRKVDL

SEQ ID NO: 671 - protein, 16 aa, HCoV-OC43
VTIDCAAFVCGDYAAC

SEQ ID NO: 672 - protein, 16 aa, HCoV-OC43
ADSCLQGDKCNIFANF

SEQ ID NO: 673 - protein, 16 aa, HCoV-OC43
WTADEAIKFLKEWNFS

SEQ ID NO: 674 - protein, 16 aa, HCoV-OC43
SRASSGNRSGNGILKW

SEQ ID NO: 675 - protein, 16 aa, HCoV-NL63
LTITELLQFVTDPSLI

SEQ ID NO: 676 - protein, 16 aa, HCoV-NL63
SVASSFVSMPSYIAYE

SEQ ID NO: 677 - protein, 16 aa, HCoV-NL63
VSVEQLLASIQHLHEG

SEQ ID NO: 678 - protein, 16 aa, HCoV-NL63
VTLEQYSTCDICKSTV

SEQ ID NO: 679 - protein, 16 aa, HCoV-NL63
LTVSDDDFVSAVANAH

SEQ ID NO: 680 - protein, 16 aa, HCoV-NL63
YVVDDIYYPASCNGVL

SEQ ID NO: 681 - protein, 16 aa, HCoV-NL63
VDSIVQKCYELSHLIS

SEQ ID NO: 682 - protein, 16 aa, HCoV-NL63
RFVAFGLQDCVTGIND

SEQ ID NO: 683 - protein, 16 aa, HCoV-NL63
YTMMDLVYAMRNFDEQ

SEQ ID NO: 684 - protein, 16 aa, HCoV-NL63
SIASTVLTVSNGVIIM

SEQ ID NO: 685 - protein, 16 aa, HCoV-NL63
ISYEEQDALFALTKRN

SEQ ID NO: 686 - protein, 16 aa, HCoV-NL63
VAFELFAKRKMGLTPP

SEQ ID NO: 687 - protein, 16 aa, HCoV-NL63
NTVSELVYENKFVPVK

SEQ ID NO: 688 - protein, 20 aa, HCoV-NL63
SACKTIEDALRLSAHLETND

SEQ ID NO: 689 - protein, 24 aa, HCoV-NL63
RSSRIAGRSALEDLLFSKVVTSGL

SEQ ID NO: 690 - protein, 17 aa, HCoV-NL63
QTTVELQGLIDQINSTY

SEQ ID NO: 691 - protein, 16 aa, HCoV-NL63
SNASSSFDCIVNLLFT

SEQ ID NO: 692 - protein, 16 aa, HCoV-NL63
LSIADLACAQYYNGIM

SEQ ID NO: 693 - protein, 16 aa, HCoV-NL63
LFQTTVELQGLIDQIN

SEQ ID NO: 694 - protein, 16 aa, HCoV-NL63
LEDLLFSKVVTSGLGT

SEQ ID NO: 695 - protein, 16 aa, HCoV-229E
SVASSFVGMPSFVAYE

SEQ ID NO: 696 - protein, 16 aa, HCoV-229E
LTITELLQFVTDPTLI

SEQ ID NO: 697 - protein, 16 aa, HCoV-229E
VSVEQLEPCAQSRLLS

SEQ ID NO: 698 - protein, 16 aa, HCoV-229E
YTMMDLCFALRNFDEK

SEQ ID NO: 699 - protein, 16 aa, HCoV-229E
SVASINSAIVCASVKR

SEQ ID NO: 700 - protein, 16 aa, HCoV-229E
VTVELEPPCRFVIDTP

SEQ ID NO: 701 - protein, 17 aa, HCoV-229E
NTVSELVYENKFVPVKE

SEQ ID NO: 702 - protein, 16 aa, HCoV-229E
FELFAKRKVGLTPPLS

SEQ ID NO: 703 - protein, 24 aa, HCoV-229E
SGSRVAGRSAIEDILFSKLVTSGL

SEQ ID NO: 704 - protein, 16 aa, HCoV-229E
ELNYTVQKLQTLIDNI

SEQ ID NO: 705 - protein, 16 aa, HCoV-229E
KTIEDALRNSARLESA

SEQ ID NO: 706 - protein, 16 aa, HCoV-229E
LSIADLACAQYYNGIM

SEQ ID NO: 707 - protein, 16 aa, HCoV-229E
SPASSQTSAKSLARSQ

SEQ ID NO: 708 - protein, 16 aa, SARS-CoV-2
MADSNGTITVEELKKL

SEQ ID NO: 709 - protein, 16 aa, SARS-CoV-2
QKKQQTVTLLPAADLD

SEQ ID NO: 710 - protein, 16 aa, SARS-CoV-2
DIADTTDAVRDPQTLE

SEQ ID NO: 711 - protein, 16 aa, SARS-CoV-2
CSCGSCCKFDEDDSEP

SEQ ID NO: 712 - protein, 16 aa, SARS-CoV-2
ARMAGNGGDAALALLL

SEQ ID NO: 713 - protein, 16 aa, SARS-CoV-2
DPSKPSKRSFIEDLLF

SEQ ID NO: 714 - protein, 16 aa, SARS-CoV-2
TESNKKFLPFQQFGRD

SEQ ID NO: 715 - protein, 16 aa, SARS-CoV-2
QIYKTPPIKDFGGFNF

SEQ ID NO: 716 - protein, 16 aa, SARS-CoV-2
PLQPELDSFKEELDKY

SEQ ID NO: 717 - protein, 16 aa, SARS-CoV-2
DLDDFSKQLQQSMSSA

SEQ ID NO: 718 - protein, 16 aa, SARS-CoV-2
IHADQLTPTWRVYSTG

SEQ ID NO: 719 - protein, 16 aa, SARS-CoV-2
LGASQRVAGDSGFAAY

SEQ ID NO: 720 - protein, 16 aa, SARS-CoV-2
SKQRRPQGLPNNTASW

SEQ ID NO: 721 - protein, 16 aa, SARS-CoV-2
YTMADLVYALRHFDEG

SEQ ID NO: 722 - protein, 16 aa, SARS-CoV-2
GRCDIKDLPKEITVAT

SEQ ID NO: 723 - protein, 16 aa, SARS-CoV-2
TGVLTESNKKFLPFQQ

SEQ ID NO: 724 - protein, 16 aa, SARS-CoV-2
SVASQSIIAYTMSLGA

SEQ ID NO: 725 - protein, 16 aa, SARS-CoV-2
SAAEASKKPRQKRTAT

SEQ ID NO: 726 - protein, 16 aa, SARS-CoV-2
KLNTDHSSSSDNIALL

SEQ ID NO: 727 - protein, 16 aa, SARS-CoV-2
ITREEAIRHVRAWIGF

SEQ ID NO: 728 - protein, 16 aa, SARS-CoV-2
QNGERSGARSKQRRPQ

SEQ ID NO: 729 - protein, 16 aa, SARS-CoV-2
TTTLEETKFLTENLLL

SEQ ID NO: 730 - protein, 16 aa, SARS-CoV-2
TTTLEETKFLTENLLL

SEQ ID NO: 731 - protein, 16 aa, SARS-CoV-2
ITISSFKWDLTAFGLV

SEQ ID NO: 732 - protein, 16 aa, SARS-CoV-2
EVPVAIHADQLTPTWR

SEQ ID NO: 733 - protein, 16 aa, SARS-CoV-2
ITFDNLKTLLSLREVR

SEQ ID NO: 734 - protein, 16 aa, SARS-CoV-2
ITFDNLKTLLSLREVR

SEQ ID NO: 735 - protein, 16 aa, SARS-CoV-2
DVNCTEVPVAIHADQL

SEQ ID NO: 736 - protein, 16 aa, SARS-CoV-2
IIAYTMSLGAENSVAY

SEQ ID NO: 737 - protein, 16 aa, SARS-CoV-2
DFSRVSAKPPPGDQFK

SEQ ID NO: 738 - protein, 16 aa, SARS-CoV-2
NAAIVLQLPQGTTLPK

SEQ ID NO: 739 - protein, 16 aa, SARS-CoV-2
KTVGELGDVRETMSYL

SEQ ID NO: 740 - protein, 16 aa, SARS-CoV-2
KTVGELGDVRETMSYL

SEQ ID NO: 741 - protein, 16 aa, SARS-CoV-2
YSTGSNVFQTRAGCLI

SEQ ID NO: 742 - protein, 16 aa, SARS-CoV-2
RITFGGPSDSTGSNQN

SEQ ID NO: 743 - protein, 16 aa, SARS-CoV-2
QNQRNAPRITFGGPSD

SEQ ID NO: 744 - protein, 16 aa, SARS-CoV-2
STASALGKLQDVVNQN

SEQ ID NO: 745 - protein, 16 aa, SARS-CoV-2
YFKNHTSPDVDLGDIS

SEQ ID NO: 746 - protein, 16 aa, SARS-CoV-2
SFKEELDKYFKNHTSP

SEQ ID NO: 747 - protein, 16 aa, SARS-CoV-2
KLDDKDPNFKDQVILL

SEQ ID NO: 748 - protein, 16 aa, SARS-CoV-2
GDEVRQIAPGQTGKIA

SEQ ID NO: 749 - protein, 16 aa, SARS-CoV-2
LCVDEAGSKSPIQYID

SEQ ID NO: 750 - protein, 16 aa, SARS-CoV-2
DETQALPQRQKKQQTV

SEQ ID NO: 751 - protein, 16 aa, SARS-CoV-2
SGVVNPVMEPIYDEPT

SEQ ID NO: 752 - protein, 16 aa, SARS-CoV-2
QRQKKQQTVTLLPAAD

SEQ ID NO: 753 - protein, 16 aa, SARS-CoV-2
SKMSGKGQQQQGQTVT

SEQ ID NO: 754 - protein, 16 aa, SARS-CoV-2
LESKMSGKGQQQQGQT

SEQ ID NO: 755 - protein, 16 aa, SARS-CoV-2
TPTWRVYSTGSNVFQT

SEQ ID NO: 756 - protein, 16 aa, SARS-CoV-2
IRGGDGKMKDLSPRWY

SEQ ID NO: 757 - protein, 16 aa, SARS-CoV-2
GHHLGRCDIKDLPKEI

SEQ ID NO: 758 - protein, 16 aa, SARS-CoV-2
QALPQRQKKQQTVTLL

SEQ ID NO: 759 - protein, 16 aa, SARS-CoV-2
HIDAYKTFPPTEPKKD

SEQ ID NO: 760 - protein, 16 aa, SARS-CoV-2
KCVNFNFNGLTGTGVL

SEQ ID NO: 761 - protein, 16 aa, SARS-CoV-2
TVAAFHQECSLQSCTQ

SEQ ID NO: 762 - protein, 16 aa, SARS-CoV-2
VKQIYKTPPIKDFGGF

SEQ ID NO: 763 - protein, 16 aa, SARS-CoV-2
GGFNFSQILPDPSKPS

SEQ ID NO: 764 - protein, 16 aa, SARS-CoV-2
LNQLESKMSGKGQQQQ

SEQ ID NO: 765 - protein, 16 aa, SARS-CoV-2
SKSPIQYIDIGNYTVS

SEQ ID NO: 766 - protein, 16 aa, SARS-CoV-2
KDEDDNLIDSYFVVKR

SEQ ID NO: 767 - protein, 16 aa, SARS-CoV-2
VDCALDPLSETKCTLK

SEQ ID NO: 768 - protein, 16 aa, SARS-CoV-2
PEAGLPYGANKDGIIW

SEQ ID NO: 769 - protein, 16 aa, SARS-CoV-2
YKLGASQRVAGDSGFA

SEQ ID NO: 770 - protein, 16 aa, SARS-CoV-2
QTRAGCLIGAEHVNNS

SEQ ID NO: 771 - protein, 16 aa, SARS-CoV-2
VTIAEILLIIMRTFKV

SEQ ID NO: 772 - protein, 16 aa, SARS-CoV-2
QGQTVTKKSAAEASKK

SEQ ID NO: 773 - protein, 16 aa, SARS-CoV-2
NNSYECDIPIGAGICA

SEQ ID NO: 774 - protein, 16 aa, SARS-CoV-2
FNFNGLTGTGVLTESN

SEQ ID NO: 775 - protein, 16 aa, SARS-CoV-2
IAARDLICAQKFNGLT

SEQ ID NO: 776 - protein, 16 aa, SARS-CoV-2
TVEELKKLLEQWNLVI

SEQ ID NO: 777 - protein, 16 aa, SARS-CoV-2
AADLDDFSKQLQQSMS

SEQ ID NO: 778 - protein, 16 aa, SARS-CoV-2
DPQTLEILDITPCSFG

SEQ ID NO: 779 - protein, 12 aa, SARS-CoV-2
EPVLKGVKLHYT

SEQ ID NO: 780 - protein, 16 aa, SARS-CoV-2
LLDRLNQLESKMSGKG

SEQ ID NO: 781 - protein, 16 aa, SARS-CoV-2
SFIEDLLFNKVTLADA

SEQ ID NO: 782 - protein, 16 aa, SARS-CoV-2
QQFGRDIADTTDAVRD

SEQ ID NO: 783 - protein, 16 aa, SARS-CoV-2
DFGGFNFSQILPDPSK

SEQ ID NO: 784 - protein, 16 aa, SARS-CoV-2
LDSFKEELDKYFKNHT

SEQ ID NO: 785 - protein, 16 aa, SARS-CoV-2
DDFSKQLQQSMSSADS

SEQ ID NO: 786 - protein, 16 aa, SARS-CoV-2
DQLTPTWRVYSTGSNV

SEQ ID NO: 787 - protein, 16 aa, SARS-CoV-2
SRYRIGNYKLNTDHSS

SEQ ID NO: 788 - protein, 16 aa, SARS-CoV-2
KQRRPQGLPNNTASWF

SEQ ID NO: 789 - protein, 16 aa, SARS-CoV-2
YTMADLVYALRHFDEG

SEQ ID NO: 790 - protein, 16 aa, SARS-CoV-2
KDLPKEITVATSRTLS

SEQ ID NO: 791 - protein, 16 aa, SARS-CoV-2
VLTESNKKFLPFQQFG

SEQ ID NO: 792 - protein, 16 aa, SARS-CoV-2
QSIIAYTMSLGAENSV

SEQ ID NO: 793 - protein, 16 aa, SARS-CoV-2
SAAEASKKPRQKRTAT

SEQ ID NO: 794 - protein, 12 aa, SARS-CoV-2
SSSSDNIALLVQ

SEQ ID NO: 795 - protein, 16 aa, SARS-CoV-2
ITREEAIRHVRAWIGF

SEQ ID NO: 796 - protein, 16 aa, SARS-CoV-2
ARSKQRRPQGLPNNTA

SEQ ID NO: 797 - protein, 16 aa, SARS-CoV-2
TTLEETKFLTENLLLY

SEQ ID NO: 798 - protein, 16 aa, SARS-CoV-2
TTLEETKFLTENLLLY

SEQ ID NO: 799 - protein, 16 aa, SARS-CoV-2
ITISSFKWDLTAFGLV

SEQ ID NO: 800 - protein, 16 aa, SARS-CoV-2
VAIHADQLTPTWRVYS

SEQ ID NO: 801 - protein, 16 aa, SARS-CoV-2
ITFDNLKTLLSLREVR

SEQ ID NO: 802 - protein, 16 aa, SARS-CoV-2
ITFDNLKTLLSLREVR

SEQ ID NO: 803 - protein, 16 aa, SARS-CoV-2
CTEVPVAIHADQLTPT

SEQ ID NO: 804 - protein, 16 aa, SARS-CoV-2
IAYTMSLGAENSVAYS

SEQ ID NO: 805 - protein, 16 aa, SARS-CoV-2
FSRVSAKPPPGDQFKH

SEQ ID NO: 806 - protein, 16 aa, SARS-CoV-2
PQGTTLPKGFYAEGSR

SEQ ID NO: 807 - protein, 16 aa, SARS-CoV-2
KTVGELGDVRETMSYL

SEQ ID NO: 808 - protein, 16 aa, SARS-CoV-2
KTVGELGDVRETMSYL

SEQ ID NO: 809 - protein, 16 aa, SARS-CoV-2
TGSNVFQTRAGCLIGA

SEQ ID NO: 810 - protein, 16 aa, SARS-CoV-2
ITFGGPSDSTGSNQNG

SEQ ID NO: 811 - protein, 16 aa, SARS-CoV-2
APRITFGGPSDSTGSN

SEQ ID NO: 812 - protein, 16 aa, SARS-CoV-2
STASALGKLQDVVNQN

SEQ ID NO: 813 - protein, 16 aa, SARS-CoV-2
KNHTSPDVDLGDISGI

SEQ ID NO: 814 - protein, 16 aa, SARS-CoV-2
FKEELDKYFKNHTSPD

SEQ ID NO: 815 - protein, 16 aa, SARS-CoV-2
DKDPNFKDQVILLNKH

SEQ ID NO: 816 - protein, 16 aa, SARS-CoV-2
EVRQIAPGQTGKIADY

SEQ ID NO: 817 - protein, 16 aa, SARS-CoV-2
CVDEAGSKSPIQYIDI

SEQ ID NO: 818 - protein, 16 aa, SARS-CoV-2
ETQALPQRQKKQQTVT

SEQ ID NO: 819 - protein, 16 aa, SARS-CoV-2
VNPVMEPIYDEPTTTT

SEQ ID NO: 820 - protein, 16 aa, SARS-CoV-2
QRQKKQQTVTLLPAAD

SEQ ID NO: 821 - protein, 16 aa, SARS-CoV-2
MSGKGQQQQGQTVTKK

SEQ ID NO: 822 - protein, 16 aa, SARS-CoV-2
LESKMSGKGQQQQGQT

SEQ ID NO: 823 - protein, 16 aa, SARS-CoV-2
TPTWRVYSTGSNVFQT

SEQ ID NO: 824 - protein, 16 aa, SARS-CoV-2
IRGGDGKMKDLSPRWY

SEQ ID NO: 825 - protein, 16 aa, SARS-CoV-2
HLGRCDIKDLPKEITV

SEQ ID NO: 826 - protein, 16 aa, SARS-CoV-2
LPQRQKKQQTVTLLPA

SEQ ID NO: 827 - protein, 16 aa, SARS-CoV-2
HIDAYKTFPPTEPKKD

SEQ ID NO: 828 - protein, 16 aa, SARS-CoV-2
KCVNFNFNGLTGTGVL

SEQ ID NO: 829 - protein, 16 aa, SARS-CoV-2
TVAAFHQECSLQSCTQ

SEQ ID NO: 830 - protein, 16 aa, SARS-CoV-2
VKQIYKTPPIKDFGGF

SEQ ID NO: 831 - protein, 16 aa, SARS-CoV-2
GGFNFSQILPDPSKPS

SEQ ID NO: 832 - protein, 16 aa, SARS-CoV-2
LNQLESKMSGKGQQQQ

SEQ ID NO: 833 - protein, 16 aa, SARS-CoV-2
KSPIQYIDIGNYTVSC

SEQ ID NO: 834 - protein, 16 aa, SARS-CoV-2
KDEDDNLIDSYFVVKR

SEQ ID NO: 835 - protein, 16 aa, SARS-CoV-2
DCALDPLSETKCTLKS

SEQ ID NO: 836 - protein, 16 aa, SARS-CoV-2
AGLPYGANKDGIIWVA

SEQ ID NO: 837 - protein, 16 aa, SARS-CoV-2
YKLGASQRVAGDSGFA

SEQ ID NO: 838 - protein, 16 aa, SARS-CoV-2
QTRAGCLIGAEHVNNS

SEQ ID NO: 839 - protein, 16 aa, SARS-CoV-2
VTIAEILLIIMRTFKV

SEQ ID NO: 840 - protein, 16 aa, SARS-CoV-2
QGQTVTKKSAAEASKK

SEQ ID NO: 841 - protein, 16 aa, SARS-CoV-2
NNSYECDIPIGAGICA

SEQ ID NO: 842 - protein, 16 aa, SARS-CoV-2
FNFNGLTGTGVLTESN

SEQ ID NO: 843 - protein, 16 aa, SARS-CoV-2
IAARDLICAQKFNGLT

SEQ ID NO: 844 - protein, 8 aa, SARS-CoV-2
TVEELKKL

SEQ ID NO: 845 - protein, 5 aa, SARS-CoV-2
AADLD

SEQ ID NO: 846 - protein, 6 aa, SARS-CoV-2
DPQTLE

SEQ ID NO: 847 - protein, 8 aa, SARS-CoV-2
SFIEDLLF

SEQ ID NO: 848 - protein, 6 aa, SARS-CoV-2
QQFGRD

SEQ ID NO: 849 - protein, 7 aa, SARS-CoV-2
DFGGFNF

SEQ ID NO: 850 - protein, 11 aa, SARS-CoV-2
LDSFKEELDKY

SEQ ID NO: 851 - protein, 14 aa, SARS-CoV-2
DDFSKQLQQSMSSA

SEQ ID NO: 852 - protein, 13 aa, SARS-CoV-2
DQLTPTWRVYSTG

SEQ ID NO: 853 - protein, 15 aa, SARS-CoV-2
KQRRPQGLPNNTASW

SEQ ID NO: 854 - protein, 16 aa, SARS-CoV-2
YTMADLVYALRHFDEG

SEQ ID NO: 855 - protein, 11 aa, SARS-CoV-2
KDLPKEITVAT

SEQ ID NO: 856 - protein, 14 aa, SARS-CoV-2
VLTESNKKFLPFQQ

SEQ ID NO: 857 - protein, 12 aa, SARS-CoV-2
QSIIAYTMSLGA

SEQ ID NO: 858 - protein, 16 aa, SARS-CoV-2
SAAEASKKPRQKRTAT

SEQ ID NO: 859 - protein, 10 aa, SARS-CoV-2
SSSSDNIALL

SEQ ID NO: 860 - protein, 16 aa, SARS-CoV-2
ITREEAIRHVRAWIGF

SEQ ID NO: 861 - protein, 9 aa, SARS-CoV-2
ARSKQRRPQ

SEQ ID NO: 862 - protein, 15 aa, SARS-CoV-2
TTLEETKFLTENLLL

SEQ ID NO: 863 - protein, 15 aa, SARS-CoV-2
TTLEETKFLTENLLL

SEQ ID NO: 864 - protein, 16 aa, SARS-CoV-2
ITISSFKWDLTAFGLV

SEQ ID NO: 865 - protein, 13 aa, SARS-CoV-2
VAIHADQLTPTWR

SEQ ID NO: 866 - protein, 16 aa, SARS-CoV-2
ITFDNLKTLLSLREVR

SEQ ID NO: 867 - protein, 16 aa, SARS-CoV-2
ITFDNLKTLLSLREVR

SEQ ID NO: 868 - protein, 13 aa, SARS-CoV-2
CTEVPVAIHADQL

SEQ ID NO: 869 - protein, 15 aa, SARS-CoV-2
IAYTMSLGAENSVAY

SEQ ID NO: 870 - protein, 15 aa, SARS-CoV-2
FSRVSAKPPPGDQFK

SEQ ID NO: 871 - protein, 8 aa, SARS-CoV-2
PQGTTLPK

SEQ ID NO: 872 - protein, 16 aa, SARS-CoV-2
KTVGELGDVRETMSYL

SEQ ID NO: 873 - protein, 16 aa, SARS-CoV-2
KTVGELGDVRETMSYL

SEQ ID NO: 874 - protein, 14 aa, SARS-CoV-2
TGSNVFQTRAGCLI

SEQ ID NO: 875 - protein, 15 aa, SARS-CoV-2
ITFGGPSDSTGSNQN

SEQ ID NO: 876 - protein, 11 aa, SARS-CoV-2
APRITFGGPSD

SEQ ID NO: 877 - protein, 16 aa, SARS-CoV-2
STASALGKLQDVVNQN

SEQ ID NO: 878 - protein, 14 aa, SARS-CoV-2
KNHTSPDVDLGDIS

SEQ ID NO: 879 - protein, 15 aa, SARS-CoV-2
FKEELDKYFKNHTSP

SEQ ID NO: 880 - protein, 13 aa, SARS-CoV-2
DKDPNFKDQVILL

SEQ ID NO: 881 - protein, 14 aa, SARS-CoV-2
EVRQIAPGQTGKIA

SEQ ID NO: 882 - protein, 15 aa, SARS-CoV-2
CVDEAGSKSPIQYID

SEQ ID NO: 883 - protein, 15 aa, SARS-CoV-2
ETQALPQRQKKQQTV

SEQ ID NO: 884 - protein, 13 aa, SARS-CoV-2
VNPVMEPIYDEPT

SEQ ID NO: 885 - protein, 16 aa, SARS-CoV-2
QRQKKQQTVTLLPAAD

SEQ ID NO: 886 - protein, 14 aa, SARS-CoV-2
MSGKGQQQQGQTVT

SEQ ID NO: 887 - protein, 16 aa, SARS-CoV-2
LESKMSGKGQQQQGQT

SEQ ID NO: 888 - protein, 16 aa, SARS-CoV-2
TPTWRVYSTGSNVFQT

SEQ ID NO: 889 - protein, 16 aa, SARS-CoV-2
IRGGDGKMKDLSPRWY

SEQ ID NO: 890 - protein, 14 aa, SARS-CoV-2
HLGRCDIKDLPKEI

SEQ ID NO: 891 - protein, 14 aa, SARS-CoV-2
LPQRQKKQQTVTLL

SEQ ID NO: 892 - protein, 16 aa, SARS-CoV-2
HIDAYKTFPPTEPKKD

SEQ ID NO: 893 - protein, 16 aa, SARS-CoV-2
KCVNFNFNGLTGTGVL

SEQ ID NO: 894 - protein, 16 aa, SARS-CoV-2
TVAAFHQECSLQSCTQ

SEQ ID NO: 895 - protein, 16 aa, SARS-CoV-2
VKQIYKTPPIKDFGGF

SEQ ID NO: 896 - protein, 16 aa, SARS-CoV-2
GGFNFSQILPDPSKPS

SEQ ID NO: 897 - protein, 16 aa, SARS-CoV-2
LNQLESKMSGKGQQQQ

SEQ ID NO: 898 - protein, 15 aa, SARS-CoV-2
KSPIQYIDIGNYTVS

SEQ ID NO: 899 - protein, 16 aa, SARS-CoV-2
KDEDDNLIDSYFVVKR

SEQ ID NO: 900 - protein, 15 aa, SARS-CoV-2
DCALDPLSETKCTLK

SEQ ID NO: 901 - protein, 14 aa, SARS-CoV-2
AGLPYGANKDGIIW

SEQ ID NO: 902 - protein, 16 aa, SARS-CoV-2
YKLGASQRVAGDSGFA

SEQ ID NO: 903 - protein, 16 aa, SARS-CoV-2
QTRAGCLIGAEHVNNS

SEQ ID NO: 904 - protein, 16 aa, SARS-CoV-2
VTIAEILLIIMRTFKV

SEQ ID NO: 905 - protein, 16 aa, SARS-CoV-2
QGQTVTKKSAAEASKK

SEQ ID NO: 906 - protein, 16 aa, SARS-CoV-2
NNSYECDIPIGAGICA

SEQ ID NO: 907 - protein, 16 aa, SARS-CoV-2
FNFNGLTGTGVLTESN

SEQ ID NO: 908 - protein, 16 aa, SARS-CoV-2
IAARDLICAQKFNGLT

SEQ ID NO: 909 - protein, 24 aa, SARS-CoV-2
MADSNGTITVEELKKLLEQWNLVI

SEQ ID NO: 910 - protein, 27 aa, SARS-CoV-2
QKKQQTVTLLPAADLDDFSKQLQQSMS

SEQ ID NO: 911 - protein, 26 aa, SARS-CoV-2
DIADTTDAVRDPQTLEILDITPCSFG

SEQ ID NO: 912 - protein, 26 aa, SARS-CoV-2
CSCGSCCKFDEDDSEPVLKGVKLHYT

SEQ ID NO: 913 - protein, 31 aa, SARS-CoV-2; identical to SEQ ID NO: 21

SEQ ID NO: 914 - protein, 24 aa, SARS-CoV-2
DPSKPSKRSFIEDLLFNKVTLADA

SEQ ID NO: 915 - protein, 26 aa, SARS-CoV-2
TESNKKFLPFQQFGRDIADTTDAVRD

SEQ ID NO: 916 - protein, 25 aa, SARS-CoV-2
QIYKTPPIKDFGGFNFSQILPDPSK

SEQ ID NO: 917 - protein, 21 aa, SARS-CoV-2
PLQPELDSFKEELDKYFKNHT

SEQ ID NO: 918 - protein, 18 aa, SARS-CoV-2
DLDDFSKQLQQSMSSADS

SEQ ID NO: 919 - protein, 19 aa, SARS-CoV-2
IHADQLTPTWRVYSTGSNV

SEQ ID NO: 920 - protein, 32 aa, SARS-CoV-2; identical to SEQ ID NO: 27

SEQ ID NO: 921 - protein, 17 aa, SARS-CoV-2
SKQRRPQGLPNNTASWF

SEQ ID NO: 922 - protein, 16 aa, SARS-CoV-2
YTMADLVYALRHFDEG

SEQ ID NO: 923 - protein, 21 aa, SARS-CoV-2
GRCDIKDLPKEITVATSRTLS

SEQ ID NO: 924 - protein, 18 aa, SARS-CoV-2
TGVLTESNKKFLPFQQFG

SEQ ID NO: 925 - protein, 20 aa, SARS-CoV-2
SVASQSIIAYTMSLGAENSV

SEQ ID NO: 926 - protein, 16 aa, SARS-CoV-2
SAAEASKKPRQKRTAT

SEQ ID NO: 927 - protein, 18 aa, SARS-CoV-2
KLNTDHSSSSDNIALLVQ

SEQ ID NO: 928 - protein, 16 aa, SARS-CoV-2
ITREEAIRHVRAWIGF

SEQ ID NO: 929 - protein, 23 aa, SARS-CoV-2
QNGERSGARSKQRRPQGLPNNTA

SEQ ID NO: 930 - protein, 17 aa, SARS-CoV-2
TTTLEETKFLTENLLLY

SEQ ID NO: 931 - protein, 17 aa, SARS-CoV-2
TTTLEETKFLTENLLLY

SEQ ID NO: 932 - protein, 16 aa, SARS-CoV-2
ITISSFKWDLTAFGLV

SEQ ID NO: 933 - protein, 19 aa, SARS-CoV-2
EVPVAIHADQLTPTWRVYS

SEQ ID NO: 934 - protein, 16 aa, SARS-CoV-2
ITFDNLKTLLSLREVR

SEQ ID NO: 935 - protein, 16 aa, SARS-CoV-2
ITFDNLKTLLSLREVR

SEQ ID NO: 936 - protein, 19 aa, SARS-CoV-2
DVNCTEVPVAIHADQLTPT

SEQ ID NO: 937 - protein, 17 aa, SARS-CoV-2
IIAYTMSLGAENSVAYS

SEQ ID NO: 938 - protein, 17 aa, SARS-CoV-2
DFSRVSAKPPPGDQFKH

SEQ ID NO: 939 - protein, 24 aa, SARS-CoV-2
NAAIVLQLPQGTTLPKGFYAEGSR

SEQ ID NO: 940 - protein, 16 aa, SARS-CoV-2
KTVGELGDVRETMSYL

SEQ ID NO: 941 - protein, 16 aa, SARS-CoV-2
KTVGELGDVRETMSYL

SEQ ID NO: 942 - protein, 18 aa, SARS-CoV-2
YSTGSNVFQTRAGCLIGA

SEQ ID NO: 943 - protein, 17 aa, SARS-CoV-2
RITFGGPSDSTGSNQNG

SEQ ID NO: 944 - protein, 21 aa, SARS-CoV-2
QNQRNAPRITFGGPSDSTGSN

SEQ ID NO: 945 - protein, 16 aa, SARS-CoV-2
STASALGKLQDVVNQN

SEQ ID NO: 946 - protein, 18 aa, SARS-CoV-2
YFKNHTSPDVDLGDISGI

SEQ ID NO: 947 - protein, 17 aa, SARS-CoV-2
SFKEELDKYFKNHTSPD

SEQ ID NO: 948 - protein, 19 aa, SARS-CoV-2
KLDDKDPNFKDQVILLNKH

SEQ ID NO: 949 - protein, 18 aa, SARS-CoV-2
GDEVRQIAPGQTGKIADY

SEQ ID NO: 950 - protein, 17 aa, SARS-CoV-2
LCVDEAGSKSPIQYIDI

SEQ ID NO: 951 - protein, 17 aa, SARS-CoV-2
DETQALPQRQKKQQTVT

SEQ ID NO: 952 - protein, 19 aa, SARS-CoV-2
SGVVNPVMEPIYDEPTTTT

SEQ ID NO: 953 - protein, 16 aa, SARS-CoV-2
QRQKKQQTVTLLPAAD

SEQ ID NO: 954 - protein, 18 aa, SARS-CoV-2
SKMSGKGQQQQGQTVTKK

SEQ ID NO: 955 - protein, 16 aa, SARS-CoV-2
LESKMSGKGQQQQGQT

SEQ ID NO: 956 - protein, 16 aa, SARS-CoV-2
TPTWRVYSTGSNVFQT

SEQ ID NO: 957 - protein, 16 aa, SARS-CoV-2
IRGGDGKMKDLSPRWY

SEQ ID NO: 958 - protein, 18 aa, SARS-CoV-2
GHHLGRCDIKDLPKEITV

SEQ ID NO: 959 - protein, 18 aa, SARS-CoV-2
QALPQRQKKQQTVTLLPA

SEQ ID NO: 960 - protein, 16 aa, SARS-CoV-2
HIDAYKTFPPTEPKKD

SEQ ID NO: 961 - protein, 16 aa, SARS-CoV-2
KCVNFNFNGLTGTGVL

SEQ ID NO: 962 - protein, 16 aa, SARS-CoV-2
TVAAFHQECSLQSCTQ

SEQ ID NO: 963 - protein, 16 aa, SARS-CoV-2
VKQIYKTPPIKDFGGF

SEQ ID NO: 964 - protein, 16 aa, SARS-CoV-2
GGFNFSQILPDPSKPS

SEQ ID NO: 965 - protein, 16 aa, SARS-CoV-2
LNQLESKMSGKGQQQQ

SEQ ID NO: 966 - protein, 17 aa, SARS-CoV-2
SKSPIQYIDIGNYTVSC

SEQ ID NO: 967 - protein, 16 aa, SARS-CoV-2
KDEDDNLIDSYFVVKR

SEQ ID NO: 968 - protein, 17 aa, SARS-CoV-2
VDCALDPLSETKCTLKS

SEQ ID NO: 969 - protein, 18 aa, SARS-CoV-2
PEAGLPYGANKDGIIWVA

SEQ ID NO: 970 - protein, 16 aa, SARS-CoV-2
YKLGASQRVAGDSGFA

SEQ ID NO: 971 - protein, 16 aa, SARS-CoV-2
QTRAGCLIGAEHVNNS

SEQ ID NO: 972 - protein, 16 aa, SARS-CoV-2
VTIAEILLIIMRTFKV

SEQ ID NO: 973 - protein, 16 aa, SARS-CoV-2
QGQTVTKKSAAEASKK

SEQ ID NO: 974 - protein, 16 aa, SARS-CoV-2
NNSYECDIPIGAGICA

SEQ ID NO: 975 - protein, 16 aa, SARS-CoV-2
FNFNGLTGTGVLTESN

SEQ ID NO: 976 - protein, 16 aa, SARS-CoV-2
IAARDLICAQKFNGLT

SEQ ID NO: 977 - protein, 16 aa, SARS-CoV-2
MADSNGTITVEELKKL

SEQ ID NO: 978 - protein, 16 aa, SARS-CoV-2
TITVEELKKLLEQWNL

SEQ ID NO: 979 - protein, 16 aa, SARS-CoV-2
QKKQQTVTLLPAADLD

SEQ ID NO: 980 - protein, 16 aa, SARS-CoV-2
VTLLPAADLDDFSKQL

SEQ ID NO: 981 - protein, 16 aa, SARS-CoV-2
DIADTTDAVRDPQTLE

SEQ ID NO: 982 - protein, 16 aa, SARS-CoV-2
DAVRDPQTLEILDITP

SEQ ID NO: 983 - protein, 16 aa, SARS-CoV-2
CSCGSCCKFDEDDSEP

SEQ ID NO: 984 - protein, 14 aa, SARS-CoV-2
DSEPVLKGVKLHYT

SEQ ID NO: 985 - protein, 16 aa, SARS-CoV-2
ARMAGNGGDAALALLL

SEQ ID NO: 986 - protein, 16 aa, SARS-CoV-2
GGDAALALLLLDRLNQ

SEQ ID NO: 987 - protein, 16 aa, SARS-CoV-2
ALLLLDRLNQLESKMS

SEQ ID NO: 988 - protein, 16 aa, SARS-CoV-2
DPSKPSKRSFIEDLLF

SEQ ID NO: 989 - protein, 16 aa, SARS-CoV-2
KRSFIEDLLFNKVTLA

SEQ ID NO: 990 - protein, 16 aa, SARS-CoV-2
TESNKKFLPFQQFGRD

SEQ ID NO: 991 - protein, 16 aa, SARS-CoV-2
FLPFQQFGRDIADTTD

SEQ ID NO: 992 - protein, 16 aa, SARS-CoV-2
QIYKTPPIKDFGGFNF

SEQ ID NO: 993 - protein, 16 aa, SARS-CoV-2
PIKDFGGFNFSQILPD

SEQ ID NO: 994 - protein, 16 aa, SARS-CoV-2
PLQPELDSFKEELDKY

SEQ ID NO: 995 - protein, 16 aa, SARS-CoV-2
DLDDFSKQLQQSMSSA

SEQ ID NO: 996 - protein, 16 aa, SARS-CoV-2
IHADQLTPTWRVYSTG

SEQ ID NO: 997 - protein, 16 aa, SARS-CoV-2
LGASQRVAGDSGFAAY

SEQ ID NO: 998 - protein, 16 aa, SARS-CoV-2
VAGDSGFAAYSRYRIG

SEQ ID NO: 999 - protein, 16 aa, SARS-CoV-2
FAAYSRYRIGNYKLNT

SEQ ID NO: 1000 - protein, 16 aa, SARS-CoV-2
SKQRRPQGLPNNTASW

SEQ ID NO: 1001 - protein, 16 aa, SARS-CoV-2
YTMADLVYALRHFDEG

SEQ ID NO: 1002 - protein, 16 aa, SARS-CoV-2
GRCDIKDLPKEITVAT

SEQ ID NO: 1003 - protein, 16 aa, SARS-CoV-2
TGVLTESNKKFLPFQQ

SEQ ID NO: 1004 - protein, 16 aa, SARS-CoV-2
SVASQSIIAYTMSLGA

SEQ ID NO: 1005 - protein, 16 aa, SARS-CoV-2
SAAEASKKPRQKRTAT

SEQ ID NO: 1006 - protein, 16 aa, SARS-CoV-2
KLNTDHSSSSDNIALL

SEQ ID NO: 1007 - protein, 12 aa, SARS-CoV-2
SSSSDNIALLVQ

SEQ ID NO: 1008 - protein, 16 aa, SARS-CoV-2
ITREEAIRHVRAWIGF

SEQ ID NO: 1009 - protein, 16 aa, SARS-CoV-2
QNGERSGARSKQRRPQ

SEQ ID NO: 1010 - protein, 16 aa, SARS-CoV-2
GARSKQRRPQGLPNNT

SEQ ID NO: 1011 - protein, 16 aa, SARS-CoV-2
TTTLEETKFLTENLLL

SEQ ID NO: 1012 - protein, 16 aa, SARS-CoV-2
TTTLEETKFLTENLLL

SEQ ID NO: 1013 - protein, 16 aa, SARS-CoV-2
ITISSFKWDLTAFGLV

SEQ ID NO: 1014 - protein, 16 aa, SARS-CoV-2
EVPVAIHADQLTPTWR

SEQ ID NO: 1015 - protein, 16 aa, SARS-CoV-2
ITFDNLKTLLSLREVR

SEQ ID NO: 1016 - protein, 16 aa, SARS-CoV-2
ITFDNLKTLLSLREVR

SEQ ID NO: 1017 - protein, 16 aa, SARS-CoV-2
DVNCTEVPVAIHADQL

SEQ ID NO: 1018 - protein, 16 aa, SARS-CoV-2
IIAYTMSLGAENSVAY

SEQ ID NO: 1019 - protein, 16 aa, SARS-CoV-2
DFSRVSAKPPPGDQFK

SEQ ID NO: 1020 - protein, 16 aa, SARS-CoV-2
NAAIVLQLPQGTTLPK

SEQ ID NO: 1021 - protein, 16 aa, SARS-CoV-2
QLPQGTTLPKGFYAEG

SEQ ID NO: 1022 - protein, 16 aa, SARS-CoV-2
KTVGELGDVRETMSYL

SEQ ID NO: 1023 - protein, 16 aa, SARS-CoV-2
KTVGELGDVRETMSYL

SEQ ID NO: 1024 - protein, 16 aa, SARS-CoV-2
YSTGSNVFQTRAGCLI

SEQ ID NO: 1025 - protein, 16 aa, SARS-CoV-2
RITFGGPSDSTGSNQN

SEQ ID NO: 1026 - protein, 16 aa, SARS-CoV-2
QNQRNAPRITFGGPSD

SEQ ID NO: 1027 - protein, 16 aa, SARS-CoV-2
STASALGKLQDVVNQN

SEQ ID NO: 1028 - protein, 16 aa, SARS-CoV-2
YFKNHTSPDVDLGDIS

SEQ ID NO: 1029 - protein, 16 aa, SARS-CoV-2
SFKEELDKYFKNHTSP

SEQ ID NO: 1030 - protein, 16 aa, SARS-CoV-2
KLDDKDPNFKDQVILL

SEQ ID NO: 1031 - protein, 16 aa, SARS-CoV-2
GDEVRQIAPGQTGKIA

SEQ ID NO: 1032 - protein, 16 aa, SARS-CoV-2
LCVDEAGSKSPIQYID

SEQ ID NO: 1033 - protein, 16 aa, SARS-CoV-2
DETQALPQRQKKQQTV

SEQ ID NO: 1034 - protein, 16 aa, SARS-CoV-2
SGVVNPVMEPIYDEPT

SEQ ID NO: 1035 - protein, 16 aa, SARS-CoV-2
QRQKKQQTVTLLPAAD

SEQ ID NO: 1036 - protein, 16 aa, SARS-CoV-2
SKMSGKGQQQQGQTVT

SEQ ID NO: 1037 - protein, 16 aa, SARS-CoV-2
LESKMSGKGQQQQGQT

SEQ ID NO: 1038 - protein, 16 aa, SARS-CoV-2
TPTWRVYSTGSNVFQT

SEQ ID NO: 1039 - protein, 16 aa, SARS-CoV-2
IRGGDGKMKDLSPRWY

SEQ ID NO: 1040 - protein, 16 aa, SARS-CoV-2
GHHLGRCDIKDLPKEI

SEQ ID NO: 1041 - protein, 16 aa, SARS-CoV-2
QALPQRQKKQQTVTLL

SEQ ID NO: 1042 - protein, 16 aa, SARS-CoV-2
HIDAYKTFPPTEPKKD

SEQ ID NO: 1043 - protein, 16 aa, SARS-CoV-2
KCVNFNFNGLTGTGVL

SEQ ID NO: 1044 - protein, 16 aa, SARS-CoV-2
TVAAFHQECSLQSCTQ

SEQ ID NO: 1045 - protein, 16 aa, SARS-CoV-2
VKQIYKTPPIKDFGGF

SEQ ID NO: 1046 - protein, 16 aa, SARS-CoV-2
GGFNFSQILPDPSKPS

SEQ ID NO: 1047 - protein, 16 aa, SARS-CoV-2
LNQLESKMSGKGQQQQ

SEQ ID NO: 1048 - protein, 16 aa, SARS-CoV-2
SKSPIQYIDIGNYTVS

SEQ ID NO: 1049 - protein, 16 aa, SARS-CoV-2
KDEDDNLIDSYFVVKR

SEQ ID NO: 1050 - protein, 16 aa, SARS-CoV-2
VDCALDPLSETKCTLK

SEQ ID NO: 1051 - protein, 16 aa, SARS-CoV-2
PEAGLPYGANKDGIIW

SEQ ID NO: 1052 - protein, 16 aa, SARS-CoV-2
YKLGASQRVAGDSGFA

SEQ ID NO: 1053 - protein, 16 aa, SARS-CoV-2
QTRAGCLIGAEHVNNS

SEQ ID NO: 1054 - protein, 16 aa, SARS-CoV-2
VTIAEILLIIMRTFKV

SEQ ID NO: 1055 - protein, 16 aa, SARS-CoV-2
QGQTVTKKSAAEASKK

SEQ ID NO: 1056 - protein, 16 aa, SARS-CoV-2
NNSYECDIPIGAGICA

SEQ ID NO: 1057 - protein, 16 aa, SARS-CoV-2
FNFNGLTGTGVLTESN

SEQ ID NO: 1058 - protein, 16 aa, SARS-CoV-2
IAARDLICAQKFNGLT

SEQ ID NO: 1059 - protein, 16 aa, SARS-CoV-2
ADSNGTITVEELKKLL

SEQ ID NO: 1060 - protein, 16 aa, SARS-CoV-2
ITVEELKKLLEQWNLV

SEQ ID NO: 1061 - protein, 16 aa, SARS-CoV-2
KKQQTVTLLPAADLDD

SEQ ID NO: 1062 - protein, 16 aa, SARS-CoV-2
TLLPAADLDDFSKQLQ

SEQ ID NO: 1063 - protein, 16 aa, SARS-CoV-2
IADTTDAVRDPQTLEI

SEQ ID NO: 1064 - protein, 16 aa, SARS-CoV-2
AVRDPQTLEILDITPC

SEQ ID NO: 1065 - protein, 16 aa, SARS-CoV-2
SCGSCCKFDEDDSEPV

SEQ ID NO: 1066 - protein, 16 aa, SARS-CoV-2
KFDEDDSEPVLKGVKL

SEQ ID NO: 1067 - protein, 13 aa, SARS-CoV-2
SEPVLKGVKLHYT

SEQ ID NO: 1068 - protein, 16 aa, SARS-CoV-2
RMAGNGGDAALALLLL

SEQ ID NO: 1069 - protein, 16 aa, SARS-CoV-2
GDAALALLLLDRLNQL

SEQ ID NO: 1070 - protein, 16 aa, SARS-CoV-2
LLLLDRLNQLESKMSG

SEQ ID NO: 1071 - protein, 16 aa, SARS-CoV-2
PSKPSKRSFIEDLLFN

SEQ ID NO: 1072 - protein, 16 aa, SARS-CoV-2
RSFIEDLLFNKVTLAD

SEQ ID NO: 1073 - protein, 16 aa, SARS-CoV-2
ESNKKFLPFQQFGRDI

SEQ ID NO: 1074 - protein, 16 aa, SARS-CoV-2
LPFQQFGRDIADTTDA

SEQ ID NO: 1075 - protein, 16 aa, SARS-CoV-2
IYKTPPIKDFGGFNFS

SEQ ID NO: 1076 - protein, 16 aa, SARS-CoV-2
IKDFGGFNFSQILPDP

SEQ ID NO: 1077 - protein, 16 aa, SARS-CoV-2
LQPELDSFKEELDKYF

SEQ ID NO: 1078 - protein, 16 aa, SARS-CoV-2
LDDFSKQLQQSMSSAD

SEQ ID NO: 1079 - protein, 16 aa, SARS-CoV-2
HADQLTPTWRVYSTGS

SEQ ID NO: 1080 - protein, 16 aa, SARS-CoV-2
GASQRVAGDSGFAAYS

SEQ ID NO: 1081 - protein, 16 aa, SARS-CoV-2
AGDSGFAAYSRYRIGN

SEQ ID NO: 1082 - protein, 16 aa, SARS-CoV-2
AAYSRYRIGNYKLNTD

SEQ ID NO: 1083 - protein, 16 aa, SARS-CoV-2
KQRRPQGLPNNTASWF

SEQ ID NO: 1084 - protein, 16 aa, SARS-CoV-2
RCDIKDLPKEITVATS

SEQ ID NO: 1085 - protein, 16 aa, SARS-CoV-2
GVLTESNKKFLPFQQF

SEQ ID NO: 1086 - protein, 16 aa, SARS-CoV-2
VASQSIIAYTMSLGAE

SEQ ID NO: 1087 - protein, 16 aa, SARS-CoV-2
LNTDHSSSSDNIALLV

SEQ ID NO: 1088 - protein, 16 aa, SARS-CoV-2
NGERSGARSKQRRPQG

SEQ ID NO: 1089 - protein, 16 aa, SARS-CoV-2
ARSKQRRPQGLPNNTA

SEQ ID NO: 1090 - protein, 16 aa, SARS-CoV-2
TTLEETKFLTENLLLY

SEQ ID NO: 1091 - protein, 16 aa, SARS-CoV-2
TTLEETKFLTENLLLY

SEQ ID NO: 1092 - protein, 16 aa, SARS-CoV-2
VPVAIHADQLTPTWRV

SEQ ID NO: 1093 - protein, 16 aa, SARS-CoV-2
VNCTEVPVAIHADQLT

SEQ ID NO: 1094 - protein, 16 aa, SARS-CoV-2
IAYTMSLGAENSVAYS

SEQ ID NO: 1095 - protein, 16 aa, SARS-CoV-2
FSRVSAKPPPGDQFKH

SEQ ID NO: 1096 - protein, 16 aa, SARS-CoV-2
AAIVLQLPQGTTLPKG

SEQ ID NO: 1097 - protein, 16 aa, SARS-CoV-2
LPQGTTLPKGFYAEGS

SEQ ID NO: 1098 - protein, 16 aa, SARS-CoV-2
STGSNVFQTRAGCLIG

SEQ ID NO: 1099 - protein, 16 aa, SARS-CoV-2
ITFGGPSDSTGSNQNG

SEQ ID NO: 1100 - protein, 16 aa, SARS-CoV-2
NQRNAPRITFGGPSDS

SEQ ID NO: 1101 - protein, 16 aa, SARS-CoV-2
FKNHTSPDVDLGDISG

SEQ ID NO: 1102 - protein, 16 aa, SARS-CoV-2
FKEELDKYFKNHTSPD

SEQ ID NO: 1103 - protein, 16 aa, SARS-CoV-2
LDDKDPNFKDQVILLN

SEQ ID NO: 1104 - protein, 16 aa, SARS-CoV-2
DEVRQIAPGQTGKIAD

SEQ ID NO: 1105 - protein, 16 aa, SARS-CoV-2
CVDEAGSKSPIQYIDI

SEQ ID NO: 1106 - protein, 16 aa, SARS-CoV-2
ETQALPQRQKKQQTVT

SEQ ID NO: 1107 - protein, 16 aa, SARS-CoV-2
GVVNPVMEPIYDEPTT

SEQ ID NO: 1108 - protein, 16 aa, SARS-CoV-2
KMSGKGQQQQGQTVTK

SEQ ID NO: 1109 - protein, 16 aa, SARS-CoV-2
HHLGRCDIKDLPKEIT

SEQ ID NO: 1110 - protein, 16 aa, SARS-CoV-2
ALPQRQKKQQTVTLLP

SEQ ID NO: 1111 - protein, 16 aa, SARS-CoV-2
KSPIQYIDIGNYTVSC

SEQ ID NO: 1112 - protein, 16 aa, SARS-CoV-2
DCALDPLSETKCTLKS

SEQ ID NO: 1113 - protein, 16 aa, SARS-CoV-2
EAGLPYGANKDGIIWV

SEQ ID NO: 1114 - protein, 16 aa, SARS-CoV-2
DSNGTITVEELKKLLE

SEQ ID NO: 1115 - protein, 16 aa, SARS-CoV-2
TVEELKKLLEQWNLVI

SEQ ID NO: 1116 - protein, 16 aa, SARS-CoV-2
KQQTVTLLPAADLDDF

SEQ ID NO: 1117 - protein, 16 aa, SARS-CoV-2
LLPAADLDDFSKQLQQ

SEQ ID NO: 1118 - protein, 16 aa, SARS-CoV-2
ADTTDAVRDPQTLEIL

SEQ ID NO: 1119 - protein, 16 aa, SARS-CoV-2
VRDPQTLEILDITPCS

SEQ ID NO: 1120 - protein, 16 aa, SARS-CoV-2
CGSCCKFDEDDSEPVL

SEQ ID NO: 1121 - protein, 16 aa, SARS-CoV-2
FDEDDSEPVLKGVKLH

SEQ ID NO: 1122 - protein, 12 aa, SARS-CoV-2
EPVLKGVKLHYT

SEQ ID NO: 1123 - protein, 16 aa, SARS-CoV-2
MAGNGGDAALALLLLD

SEQ ID NO: 1124 - protein, 16 aa, SARS-CoV-2
DAALALLLLDRLNQLE

SEQ ID NO: 1125 - protein, 16 aa, SARS-CoV-2
LLLDRLNQLESKMSGK

SEQ ID NO: 1126 - protein, 16 aa, SARS-CoV-2
SKPSKRSFIEDLLFNK

SEQ ID NO: 1127 - protein, 16 aa, SARS-CoV-2
SFIEDLLFNKVTLADA

SEQ ID NO: 1128 - protein, 16 aa, SARS-CoV-2
SNKKFLPFQQFGRDIA

SEQ ID NO: 1129 - protein, 16 aa, SARS-CoV-2
PFQQFGRDIADTTDAV

SEQ ID NO: 1130 - protein, 16 aa, SARS-CoV-2
YKTPPIKDFGGFNFSQ

SEQ ID NO: 1131 - protein, 16 aa, SARS-CoV-2
KDFGGFNFSQILPDPS

SEQ ID NO: 1132 - protein, 16 aa, SARS-CoV-2
QPELDSFKEELDKYFK

SEQ ID NO: 1133 - protein, 16 aa, SARS-CoV-2
DDFSKQLQQSMSSADS

SEQ ID NO: 1134 - protein, 16 aa, SARS-CoV-2
ADQLTPTWRVYSTGSN

SEQ ID NO: 1135 - protein, 16 aa, SARS-CoV-2
ASQRVAGDSGFAAYSR

SEQ ID NO: 1136 - protein, 16 aa, SARS-CoV-2
GDSGFAAYSRYRIGNY

SEQ ID NO: 1137 - protein, 16 aa, SARS-CoV-2
AYSRYRIGNYKLNTDH

SEQ ID NO: 1138 - protein, 16 aa, SARS-CoV-2
CDIKDLPKEITVATSR

SEQ ID NO: 1139 - protein, 16 aa, SARS-CoV-2
VLTESNKKFLPFQQFG

SEQ ID NO: 1140 - protein, 16 aa, SARS-CoV-2
ASQSIIAYTMSLGAEN

SEQ ID NO: 1141 - protein, 16 aa, SARS-CoV-2
NTDHSSSSDNIALLVQ

SEQ ID NO: 1142 - protein, 16 aa, SARS-CoV-2
GERSGARSKQRRPQGL

SEQ ID NO: 1143 - protein, 16 aa, SARS-CoV-2
PVAIHADQLTPTWRVY

SEQ ID NO: 1144 - protein, 16 aa, SARS-CoV-2
NCTEVPVAIHADQLTP

SEQ ID NO: 1145 - protein, 16 aa, SARS-CoV-2
AIVLQLPQGTTLPKGF

SEQ ID NO: 1146 - protein, 16 aa, SARS-CoV-2
PQGTTLPKGFYAEGSR

SEQ ID NO: 1147 - protein, 16 aa, SARS-CoV-2
TGSNVFQTRAGCLIGA

SEQ ID NO: 1148 - protein, 16 aa, SARS-CoV-2
QRNAPRITFGGPSDST

SEQ ID NO: 1149 - protein, 16 aa, SARS-CoV-2
KNHTSPDVDLGDISGI

SEQ ID NO: 1150 - protein, 16 aa, SARS-CoV-2
DDKDPNFKDQVILLNK

SEQ ID NO: 1151 - protein, 16 aa, SARS-CoV-2
EVRQIAPGQTGKIADY

SEQ ID NO: 1152 - protein, 16 aa, SARS-CoV-2
VVNPVMEPIYDEPTTT

SEQ ID NO: 1153 - protein, 16 aa, SARS-CoV-2
MSGKGQQQQGQTVTKK

SEQ ID NO: 1154 - protein, 16 aa, SARS-CoV-2
HLGRCDIKDLPKEITV

SEQ ID NO: 1155 - protein, 16 aa, SARS-CoV-2
LPQRQKKQQTVTLLPA

SEQ ID NO: 1156 - protein, 16 aa, SARS-CoV-2
AGLPYGANKDGIIWVA

SEQ ID NO: 1157 - protein, 16 aa, SARS-CoV-2
SNGTITVEELKKLLEQ

SEQ ID NO: 1158 - protein, 16 aa, SARS-CoV-2
QQTVTLLPAADLDDFS

SEQ ID NO: 1159 - protein, 16 aa, SARS-CoV-2
LPAADLDDFSKQLQQS

SEQ ID NO: 1160 - protein, 16 aa, SARS-CoV-2
DTTDAVRDPQTLEILD

SEQ ID NO: 1161 - protein, 16 aa, SARS-CoV-2
RDPQTLEILDITPCSF

SEQ ID NO: 1162 - protein, 16 aa, SARS-CoV-2
GSCCKFDEDDSEPVLK

SEQ ID NO: 1163 - protein, 16 aa, SARS-CoV-2
DEDDSEPVLKGVKLHY

SEQ ID NO: 1164 - protein, 16 aa, SARS-CoV-2
AGNGGDAALALLLLDR

SEQ ID NO: 1165 - protein, 16 aa, SARS-CoV-2
AALALLLLDRLNQLES

SEQ ID NO: 1166 - protein, 16 aa, SARS-CoV-2
LLDRLNQLESKMSGKG

SEQ ID NO: 1167 - protein, 16 aa, SARS-CoV-2
KPSKRSFIEDLLFNKV

SEQ ID NO: 1168 - protein, 16 aa, SARS-CoV-2
NKKFLPFQQFGRDIAD

SEQ ID NO: 1169 - protein, 16 aa, SARS-CoV-2
FQQFGRDIADTTDAVR

SEQ ID NO: 1170 - protein, 16 aa, SARS-CoV-2
KTPPIKDFGGFNFSQI

SEQ ID NO: 1171 - protein, 16 aa, SARS-CoV-2
DFGGFNFSQILPDPSK

SEQ ID NO: 1172 - protein, 16 aa, SARS-CoV-2
PELDSFKEELDKYFKN

SEQ ID NO: 1173 - protein, 16 aa, SARS-CoV-2
DQLTPTWRVYSTGSNV

SEQ ID NO: 1174 - protein, 16 aa, SARS-CoV-2
SQRVAGDSGFAAYSRY

SEQ ID NO: 1175 - protein, 16 aa, SARS-CoV-2
DSGFAAYSRYRIGNYK

SEQ ID NO: 1176 - protein, 16 aa, SARS-CoV-2
YSRYRIGNYKLNTDHS

SEQ ID NO: 1177 - protein, 16 aa, SARS-CoV-2
DIKDLPKEITVATSRT

SEQ ID NO: 1178 - protein, 16 aa, SARS-CoV-2
SQSIIAYTMSLGAENS

SEQ ID NO: 1179 - protein, 15 aa, SARS-CoV-2
TDHSSSSDNIALLVQ

SEQ ID NO: 1180 - protein, 16 aa, SARS-CoV-2
ERSGARSKQRRPQGLP

SEQ ID NO: 1181 - protein, 16 aa, SARS-CoV-2
VAIHADQLTPTWRVYS

SEQ ID NO: 1182 - protein, 16 aa, SARS-CoV-2
CTEVPVAIHADQLTPT

SEQ ID NO: 1183 - protein, 16 aa, SARS-CoV-2
IVLQLPQGTTLPKGFY

SEQ ID NO: 1184 - protein, 16 aa, SARS-CoV-2
RNAPRITFGGPSDSTG

SEQ ID NO: 1185 - protein, 16 aa, SARS-CoV-2
DKDPNFKDQVILLNKH

SEQ ID NO: 1186 - protein, 16 aa, SARS-CoV-2
VNPVMEPIYDEPTTTT

SEQ ID NO: 1187 - protein, 16 aa, SARS-CoV-2
NGTITVEELKKLLEQW

SEQ ID NO: 1188 - protein, 16 aa, SARS-CoV-2
QTVTLLPAADLDDFSK

SEQ ID NO: 1189 - protein, 16 aa, SARS-CoV-2
PAADLDDFSKQLQQSM

SEQ ID NO: 1190 - protein, 16 aa, SARS-CoV-2
TTDAVRDPQTLEILDI

SEQ ID NO: 1191 - protein, 16 aa, SARS-CoV-2
DPQTLEILDITPCSFG

SEQ ID NO: 1192 - protein, 16 aa, SARS-CoV-2
SCCKFDEDDSEPVLKG

SEQ ID NO: 1193 - protein, 16 aa, SARS-CoV-2
EDDSEPVLKGVKLHYT

SEQ ID NO: 1194 - protein, 16 aa, SARS-CoV-2
GNGGDAALALLLLDRL

SEQ ID NO: 1195 - protein, 16 aa, SARS-CoV-2
ALALLLLDRLNQLESK

SEQ ID NO: 1196 - protein, 16 aa, SARS-CoV-2
PSKRSFIEDLLFNKVT

SEQ ID NO: 1197 - protein, 16 aa, SARS-CoV-2
KKFLPFQQFGRDIADT

SEQ ID NO: 1198 - protein, 16 aa, SARS-CoV-2
QQFGRDIADTTDAVRD

SEQ ID NO: 1199 - protein, 16 aa, SARS-CoV-2
TPPIKDFGGFNFSQIL

SEQ ID NO: 1200 - protein, 16 aa, SARS-CoV-2
ELDSFKEELDKYFKNH

SEQ ID NO: 1201 - protein, 16 aa, SARS-CoV-2
QRVAGDSGFAAYSRYR

SEQ ID NO: 1202 - protein, 16 aa, SARS-CoV-2
SGFAAYSRYRIGNYKL

SEQ ID NO: 1203 - protein, 16 aa, SARS-CoV-2
SRYRIGNYKLNTDHSS

SEQ ID NO: 1204 - protein, 16 aa, SARS-CoV-2
IKDLPKEITVATSRTL

SEQ ID NO: 1205 - protein, 16 aa, SARS-CoV-2
QSIIAYTMSLGAENSV

SEQ ID NO: 1206 - protein, 14 aa, SARS-CoV-2
DHSSSSDNIALLVQ

SEQ ID NO: 1207 - protein, 16 aa, SARS-CoV-2
RSGARSKQRRPQGLPN

SEQ ID NO: 1208 - protein, 16 aa, SARS-CoV-2
VLQLPQGTTLPKGFYA

SEQ ID NO: 1209 - protein, 16 aa, SARS-CoV-2
NAPRITFGGPSDSTGS

SEQ ID NO: 1210 - protein, 16 aa, SARS-CoV-2
GTITVEELKKLLEQWN

SEQ ID NO: 1211 - protein, 16 aa, SARS-CoV-2
TVTLLPAADLDDFSKQ

SEQ ID NO: 1212 - protein, 16 aa, SARS-CoV-2
AADLDDFSKQLQQSMS

SEQ ID NO: 1213 - protein, 16 aa, SARS-CoV-2
TDAVRDPQTLEILDIT

SEQ ID NO: 1214 - protein, 16 aa, SARS-CoV-2
CCKFDEDDSEPVLKGV

SEQ ID NO: 1215 - protein, 15 aa, SARS-CoV-2
DDSEPVLKGVKLHYT

SEQ ID NO: 1216 - protein, 16 aa, SARS-CoV-2
NGGDAALALLLLDRLN

SEQ ID NO: 1217 - protein, 16 aa, SARS-CoV-2
LALLLLDRLNQLESKM

SEQ ID NO: 1218 - protein, 16 aa, SARS-CoV-2
SKRSFIEDLLFNKVTL

SEQ ID NO: 1219 - protein, 16 aa, SARS-CoV-2
KFLPFQQFGRDIADTT

SEQ ID NO: 1220 - protein, 16 aa, SARS-CoV-2
PPIKDFGGFNFSQILP

SEQ ID NO: 1221 - protein, 16 aa, SARS-CoV-2
LDSFKEELDKYFKNHT

SEQ ID NO: 1222 - protein, 16 aa, SARS-CoV-2
RVAGDSGFAAYSRYRI

SEQ ID NO: 1223 - protein, 16 aa, SARS-CoV-2
GFAAYSRYRIGNYKLN

SEQ ID NO: 1224 - protein, 16 aa, SARS-CoV-2
KDLPKEITVATSRTLS

SEQ ID NO: 1225 - protein, 13 aa, SARS-CoV-2
HSSSSDNIALLVQ

SEQ ID NO: 1226 - protein, 16 aa, SARS-CoV-2
SGARSKQRRPQGLPNN

SEQ ID NO: 1227 - protein, 16 aa, SARS-CoV-2
LQLPQGTTLPKGFYAE

SEQ ID NO: 1228 - protein, 16 aa, SARS-CoV-2
APRITFGGPSDSTGSN

SEQ ID NO: 1229 - protein, 16 aa, SARS-CoV-2
YTMADLVYALRHFDEG

SEQ ID NO: 1230 - protein, 16 aa, SARS-CoV-2
MADSNGTITVEELKKL

SEQ ID NO: 1231 - protein, 16 aa, SARS-CoV-2
ITREEAIRHVRAWIGF

SEQ ID NO: 1232 - protein, 16 aa, SARS-CoV-2
ITISSFKWDLTAFGLV

SEQ ID NO: 1233 - protein, 16 aa, SARS-CoV-2
ITISSFKWDLTAFGLV

SEQ ID NO: 1234 - protein, 16 aa, SARS-CoV-2
DIADTTDAVRDPQTLE

SEQ ID NO: 1235 - protein, 16 aa, SARS-CoV-2
ITFDNLKTLLSLREVR

SEQ ID NO: 1236 - protein, 16 aa, SARS-CoV-2
ITFDNLKTLLSLREVR

SEQ ID NO: 1237 - protein, 16 aa, SARS-CoV-2
TESNKKFLPFQQFGRD

SEQ ID NO: 1238 - protein, 16 aa, SARS-CoV-2
KTVGELGDVRETMSYL

SEQ ID NO: 1239 - protein, 16 aa, SARS-CoV-2
KTVGELGDVRETMSYL

SEQ ID NO: 1240 - protein, 16 aa, SARS-CoV-2
STASALGKLQDVVNQN

SEQ ID NO: 1241 - protein, 16 aa, SARS-CoV-2
KLNTDHSSSSDNIALL

SEQ ID NO: 1242 - protein, 16 aa, SARS-CoV-2
ARMAGNGGDAALALLL

SEQ ID NO: 1243 - protein, 16 aa, SARS-CoV-2
IRGGDGKMKDLSPRWY

SEQ ID NO: 1244 - protein, 16 aa, SARS-CoV-2
QNQRNAPRITFGGPSD

SEQ ID NO: 1245 - protein, 16 aa, SARS-CoV-2
TGVLTESNKKFLPFQQ

SEQ ID NO: 1246 - protein, 16 aa, SARS-CoV-2
KLDDKDPNFKDQVILL

SEQ ID NO: 1247 - protein, 16 aa, SARS-CoV-2
HIDAYKTFPPTEPKKD

SEQ ID NO: 1248 - protein, 16 aa, SARS-CoV-2
TVAAFHQECSLQSCTQ

SEQ ID NO: 1249 - protein, 16 aa, SARS-CoV-2
LGASQRVAGDSGFAAY

SEQ ID NO: 1250 - protein, 16 aa, SARS-CoV-2
QRQKKQQTVTLLPAAD

SEQ ID NO: 1251 - protein, 16 aa, SARS-CoV-2
VKQIYKTPPIKDFGGF

SEQ ID NO: 1252 - protein, 16 aa, SARS-CoV-2
NNAAIVLQLPQGTTLP

SEQ ID NO: 1253 - protein, 16 aa, SARS-CoV-2
CCSCGSCCKFDEDDSE

SEQ ID NO: 1254 - protein, 16 aa, SARS-CoV-2
PDPSKPSKRSFIEDLL

SEQ ID NO: 1255 - protein, 16 aa, SARS-CoV-2
KDEDDNLIDSYFVVKR

SEQ ID NO: 1256 - protein, 16 aa, SARS-CoV-2
RITFGGPSDSTGSNQN

SEQ ID NO: 1257 - protein, 16 aa, SARS-CoV-2
GDEVRQIAPGQTGKIA

SEQ ID NO: 1258 - protein, 16 aa, SARS-CoV-2
DFSRVSAKPPPGDQFK

SEQ ID NO: 1259 - protein, 16 aa, SARS-CoV-2
QDVNCTEVPVAIHADQ

SEQ ID NO: 1260 - protein, 16 aa, SARS-CoV-2
IHADQLTPTWRVYSTG

SEQ ID NO: 1261 - protein, 16 aa, SARS-CoV-2
PLQPELDSFKEELDKY

SEQ ID NO: 1262 - protein, 16 aa, SARS-CoV-2
LESKMSGKGQQQQGQT

SEQ ID NO: 1263 - protein, 16 aa, SARS-CoV-2
AGHHLGRCDIKDLPKE

SEQ ID NO: 1264 - protein, 16 aa, SARS-CoV-2
QTRAGCLIGAEHVNNS

SEQ ID NO: 1265 - protein, 16 aa, SARS-CoV-2
VTIAEILLIIMRTFKV

SEQ ID NO: 1266 - protein, 16 aa, SARS-CoV-2
VDCALDPLSETKCTLK

SEQ ID NO: 1267 - protein, 16 aa, SARS-CoV-2
GSKSPIQYIDIGNYTV

SEQ ID NO: 1268 - protein, 16 aa, SARS-CoV-2
RSVASQSIIAYTMSLG

SEQ ID NO: 1269 - protein, 16 aa, SARS-CoV-2
FNFNGLTGTGVLTESN

SEQ ID NO: 1270 - protein, 16 aa, SARS-CoV-2
IAARDLICAQKFNGLT

SEQ ID NO: 1271 - protein, 16 aa, SARS-CoV-2
QNGERSGARSKQRRPQ

SEQ ID NO: 1272 - protein, 16 aa, SARS-CoV-2
PEAGLPYGANKDGIIW

SEQ ID NO: 1273 - protein, 16 aa, SARS-CoV-2
ADETQALPQRQKKQQT

SEQ ID NO: 1274 - protein, 16 aa, SARS-CoV-2
VYSTGSNVFQTRAGCL

SEQ ID NO: 1275 - protein, 16 aa, SARS-CoV-2
GGFNFSQILPDPSKPS

SEQ ID NO: 1276 - protein, 16 aa, SARS-CoV-2
TLSYYKLGASQRVAGD

SEQ ID NO: 1277 - protein, 16 aa, SARS-CoV-2
LNQLESKMSGKGQQQQ

SEQ ID NO: 1278 - protein, 16 aa, SARS-CoV-2
QGQTVTKKSAAEASKK

SEQ ID NO: 1279 - protein, 16 aa, SARS-CoV-2
PYGANKDGIIWVATEG

SEQ ID NO: 1280 - protein, 16 aa, SARS-CoV-2
KSAPLIELCVDEAGSK

SEQ ID NO: 1281 - protein, 16 aa, SARS-CoV-2
SSGVVNPVMEPIYDEP

SEQ ID NO: 1282 - protein, 16 aa, SARS-CoV-2
VTTTLEETKFLTENLL

SEQ ID NO: 1283 - protein, 16 aa, SARS-CoV-2
VTTTLEETKFLTENLL

SEQ ID NO: 1284 - protein, 16 aa, SARS-CoV-2
YFKNHTSPDVDLGDIS

SEQ ID NO: 1285 - protein, 16 aa, SARS-CoV-2
VNNSYECDIPIGAGIC

SEQ ID NO: 1286 - protein, 16 aa, SARS-CoV-2
GANKDGIIWVATEGAL

SEQ ID NO: 1287 - protein, 16 aa, SARS-CoV-2
AIKLDDKDPNFKDQVI

SEQ ID NO: 1288 - protein, 16 aa, SARS-CoV-2
KIVDEPEEHVQIHTID

SEQ ID NO: 1289 - protein, 16 aa, SARS-CoV-2
LCVDEAGSKSPIQYID

SEQ ID NO: 1290 - protein, 16 aa, SARS-CoV-2
NKDGIIWVATEGALNT

SEQ ID NO: 1291 - protein, 16 aa, SARS-CoV-2
LDGEVITFDNLKTLLS

SEQ ID NO: 1292 - protein, 16 aa, SARS-CoV-2
LDGEVITFDNLKTLLS

SEQ ID NO: 1293 - protein, 16 aa, SARS-CoV-2
FTVEKGIYQTSNFRVQ

SEQ ID NO: 1294 - protein, 16 aa, SARS-CoV-2
LLALHRSYLTPGDSSS

SEQ ID NO: 1295 - protein, 16 aa, SARS-CoV-2
KQGEIKDATPSDFVRA

SEQ ID NO: 1296 - protein, 16 aa, SARS-CoV-2
GGDGKMKDLSPRWYFY

SEQ ID NO: 1297 - protein, 16 aa, SARS-CoV-2
NKCVNFNFNGLTGTGV

SEQ ID NO: 1298 - protein, 16 aa, SARS-CoV-2
QILPDPSKPSKRSFIE

SEQ ID NO: 1299 - protein, 16 aa, SARS-CoV-2
VDLGDISGINASVVNI

SEQ ID NO: 1300 - protein, 16 aa, SARS-CoV-2
SQPFLMDLEGKQGNFK

SEQ ID NO: 1301 - protein, 16 aa, SARS-CoV-2
KDATPSDFVRATATIP

SEQ ID NO: 1302 - protein, 16 aa, SARS-CoV-2
KSAAEASKKPRQKRTA

SEQ ID NO: 1303 - protein, 16 aa, SARS-CoV-2
TGIAVEQDKNTQEVFA

SEQ ID NO: 1304 - protein, 16 aa, SARS-CoV-2
AEVAVKMFDAYVNTFS

SEQ ID NO: 1305 - protein, 16 aa, SARS-CoV-2
NIQKEIDRLNEVAKNL

SEQ ID NO: 1306 - protein, 16 aa, SARS-CoV-2
ECDIPIGAGICASYQT

SEQ ID NO: 1307 - protein, 16 aa, SARS-CoV-2
GEIKDATPSDFVRATA

SEQ ID NO: 1308 - protein, 16 aa, SARS-CoV-2
IAPGQTGKIADYNYKL

SEQ ID NO: 1309 - protein, 16 aa, SARS-CoV-2
TQLNRALTGIAVEQDK

SEQ ID NO: 1310 - protein, 16 aa, SARS-CoV-2
LTLQQIELKFNPPALQ

SEQ ID NO: 1311 - protein, 16 aa, SARS-CoV-2
LTLQQIELKFNPPALQ

SEQ ID NO: 1312 - protein, 16 aa, SARS-CoV-2
SPDVDLGDISGINASV

SEQ ID NO: 1313 - protein, 16 aa, SARS-CoV-2
TTVDNINLHTQVVDMS

SEQ ID NO: 1314 - protein, 16 aa, SARS-CoV-2
TTVDNINLHTQVVDMS

SEQ ID NO: 1315 - protein, 16 aa, SARS-CoV-2
YTMADLVYALRHFDEG

SEQ ID NO: 1316 - protein, 16 aa, SARS-CoV-2
TVEELKKLLEQWNLVI

SEQ ID NO: 1317 - protein, 16 aa, SARS-CoV-2
ITREEAIRHVRAWIGF

SEQ ID NO: 1318 - protein, 16 aa, SARS-CoV-2
ITISSFKWDLTAFGLV

SEQ ID NO: 1319 - protein, 16 aa, SARS-CoV-2
ITISSFKWDLTAFGLV

SEQ ID NO: 1320 - protein, 16 aa, SARS-CoV-2
DPQTLEILDITPCSFG

SEQ ID NO: 1321 - protein, 16 aa, SARS-CoV-2
ITFDNLKTLLSLREVR

SEQ ID NO: 1322 - protein, 16 aa, SARS-CoV-2
ITFDNLKTLLSLREVR

SEQ ID NO: 1323 - protein, 16 aa, SARS-CoV-2
QQFGRDIADTTDAVRD

SEQ ID NO: 1324 - protein, 16 aa, SARS-CoV-2
KTVGELGDVRETMSYL

SEQ ID NO: 1325 - protein, 16 aa, SARS-CoV-2
KTVGELGDVRETMSYL

SEQ ID NO: 1326 - protein, 16 aa, SARS-CoV-2
STASALGKLQDVVNQN

SEQ ID NO: 1327 - protein, 12 aa, SARS-CoV-2
SSSSDNIALLVQ

SEQ ID NO: 1328 - protein, 16 aa, SARS-CoV-2
LLDRLNQLESKMSGKG

SEQ ID NO: 1329 - protein, 16 aa, SARS-CoV-2
IRGGDGKMKDLSPRWY

SEQ ID NO: 1330 - protein, 16 aa, SARS-CoV-2
APRITFGGPSDSTGSN

SEQ ID NO: 1331 - protein, 16 aa, SARS-CoV-2
VLTESNKKFLPFQQFG

SEQ ID NO: 1332 - protein, 16 aa, SARS-CoV-2
DKDPNFKDQVILLNKH

SEQ ID NO: 1333 - protein, 16 aa, SARS-CoV-2
HIDAYKTFPPTEPKKD

SEQ ID NO: 1334 - protein, 16 aa, SARS-CoV-2
TVAAFHQECSLQSCTQ

SEQ ID NO: 1335 - protein, 16 aa, SARS-CoV-2
SRYRIGNYKLNTDHSS

SEQ ID NO: 1336 - protein, 16 aa, SARS-CoV-2
DDFSKQLQQSMSSADS

SEQ ID NO: 1337 - protein, 16 aa, SARS-CoV-2
DFGGFNFSQILPDPSK

SEQ ID NO: 1338 - protein, 16 aa, SARS-CoV-2
QGTTLPKGFYAEGSRG

SEQ ID NO: 1339 - protein, 12 aa, SARS-CoV-2
EPVLKGVKLHYT

SEQ ID NO: 1340 - protein, 16 aa, SARS-CoV-2
FIEDLLFNKVTLADAG

SEQ ID NO: 1341 - protein, 16 aa, SARS-CoV-2
KDEDDNLIDSYFVVKR

SEQ ID NO: 1342 - protein, 16 aa, SARS-CoV-2
ITFGGPSDSTGSNQNG

SEQ ID NO: 1343 - protein, 16 aa, SARS-CoV-2
EVRQIAPGQTGKIADY

SEQ ID NO: 1344 - protein, 16 aa, SARS-CoV-2
FSRVSAKPPPGDQFKH

SEQ ID NO: 1345 - protein, 16 aa, SARS-CoV-2
VAIHADQLTPTWRVYS

SEQ ID NO: 1346 - protein, 16 aa, SARS-CoV-2
PTWRVYSTGSNVFQTR

SEQ ID NO: 1347 - protein, 16 aa, SARS-CoV-2
KEELDKYFKNHTSPDV

SEQ ID NO: 1348 - protein, 16 aa, SARS-CoV-2
SGKGQQQQGQTVTKKS

SEQ ID NO: 1349 - protein, 16 aa, SARS-CoV-2
KDLPKEITVATSRTLS

SEQ ID NO: 1350 - protein, 16 aa, SARS-CoV-2
QTRAGCLIGAEHVNNS

SEQ ID NO: 1351 - protein, 16 aa, SARS-CoV-2
VTIAEILLIIMRTFKV

SEQ ID NO: 1352 - protein, 16 aa, SARS-CoV-2
DCALDPLSETKCTLKS

SEQ ID NO: 1353 - protein, 16 aa, SARS-CoV-2
KSPIQYIDIGNYTVSC

SEQ ID NO: 1354 - protein, 16 aa, SARS-CoV-2
AYTMSLGAENSVAYSN

SEQ ID NO: 1355 - protein, 16 aa, SARS-CoV-2
FNFNGLTGTGVLTESN

SEQ ID NO: 1356 - protein, 16 aa, SARS-CoV-2
IAARDLICAQKFNGLT

SEQ ID NO: 1357 - protein, 16 aa, SARS-CoV-2
RRPQGLPNNTASWFTA

SEQ ID NO: 1358 - protein, 16 aa, SARS-CoV-2
GLPYGANKDGIIWVAT

SEQ ID NO: 1359 - protein, 16 aa, SARS-CoV-2
LPQRQKKQQTVTLLPA

SEQ ID NO: 1360 - protein, 16 aa, SARS-CoV-2
GSNVFQTRAGCLIGAE

SEQ ID NO: 1361 - protein, 16 aa, SARS-CoV-2
GFNFSQILPDPSKPSK

SEQ ID NO: 1362 - protein, 16 aa, SARS-CoV-2
YKLGASQRVAGDSGFA

SEQ ID NO: 1363 - protein, 16 aa, SARS-CoV-2
NQLESKMSGKGQQQQG

SEQ ID NO: 1364 - protein, 16 aa, SARS-CoV-2
TVTKKSAAEASKKPRQ

SEQ ID NO: 1365 - protein, 16 aa, SARS-CoV-2
PYGANKDGIIWVATEG

SEQ ID NO: 1366 - protein, 16 aa, SARS-CoV-2
KSAPLIELCVDEAGSK

SEQ ID NO: 1367 - protein, 15 aa, SARS-CoV-2
EPIYDEPTTTTSVPL

SEQ ID NO: 1368 - protein, 16 aa, SARS-CoV-2
TTLEETKFLTENLLLY

SEQ ID NO: 1369 - protein, 16 aa, SARS-CoV-2
TTLEETKFLTENLLLY

SEQ ID NO: 1370 - protein, 16 aa, SARS-CoV-2
HTSPDVDLGDISGINA

SEQ ID NO: 1371 - protein, 16 aa, SARS-CoV-2
NNSYECDIPIGAGICA

SEQ ID NO: 1372 - protein, 16 aa, SARS-CoV-2
GANKDGIIWVATEGAL

SEQ ID NO: 1373 - protein, 16 aa, SARS-CoV-2
AIKLDDKDPNFKDQVI

SEQ ID NO: 1374 - protein, 16 aa, SARS-CoV-2
IVDEPEEHVQIHTIDG

SEQ ID NO: 1375 - protein, 16 aa, SARS-CoV-2
EAGSKSPIQYIDIGNY

SEQ ID NO: 1376 - protein, 16 aa, SARS-CoV-2
KDGIIWVATEGALNTP

SEQ ID NO: 1377 - protein, 16 aa, SARS-CoV-2
LDGEVITFDNLKTLLS

SEQ ID NO: 1378 - protein, 16 aa, SARS-CoV-2
LDGEVITFDNLKTLLS

SEQ ID NO: 1379 - protein, 16 aa, SARS-CoV-2
FTVEKGIYQTSNFRVQ

SEQ ID NO: 1380 - protein, 16 aa, SARS-CoV-2
LLALHRSYLTPGDSSS

SEQ ID NO: 1381 - protein, 16 aa, SARS-CoV-2
KQGEIKDATPSDFVRA

SEQ ID NO: 1382 - protein, 16 aa, SARS-CoV-2
GDGKMKDLSPRWYFYY

SEQ ID NO: 1383 - protein, 16 aa, SARS-CoV-2
KCVNFNFNGLTGTGVL

SEQ ID NO: 1384 - protein, 16 aa, SARS-CoV-2
ILPDPSKPSKRSFIED

SEQ ID NO: 1385 - protein, 16 aa, SARS-CoV-2
VDLGDISGINASVVNI

SEQ ID NO: 1386 - protein, 16 aa, SARS-CoV-2
SQPFLMDLEGKQGNFK

SEQ ID NO: 1387 - protein, 16 aa, SARS-CoV-2
KDATPSDFVRATATIP

SEQ ID NO: 1388 - protein, 16 aa, SARS-CoV-2
AAEASKKPRQKRTATK

SEQ ID NO: 1389 - protein, 16 aa, SARS-CoV-2
IAVEQDKNTQEVFAQV

SEQ ID NO: 1390 - protein, 16 aa, SARS-CoV-2
AEVAVKMFDAYVNTFS

SEQ ID NO: 1391 - protein, 16 aa, SARS-CoV-2
NIQKEIDRLNEVAKNL

SEQ ID NO: 1392 - protein, 16 aa, SARS-CoV-2
ECDIPIGAGICASYQT

SEQ ID NO: 1393 - protein, 16 aa, SARS-CoV-2
GEIKDATPSDFVRATA

SEQ ID NO: 1394 - protein, 16 aa, SARS-CoV-2
IAPGQTGKIADYNYKL

SEQ ID NO: 1395 - protein, 16 aa, SARS-CoV-2
TQLNRALTGIAVEQDK

SEQ ID NO: 1396 - protein, 16 aa, SARS-CoV-2
LTLQQIELKFNPPALQ

SEQ ID NO: 1397 - protein, 16 aa, SARS-CoV-2
LTLQQIELKFNPPALQ

SEQ ID NO: 1398 - protein, 16 aa, SARS-CoV-2
PDVDLGDISGINASVV

SEQ ID NO: 1399 - protein, 16 aa, SARS-CoV-2
TTVDNINLHTQVVDMS

SEQ ID NO: 1400 - protein, 16 aa, SARS-CoV-2
TTVDNINLHTQVVDMS

SEQ ID NO: 1401 - protein, 16 aa, SARS-CoV-2
YTMADLVYALRHFDEG

SEQ ID NO: 1402 - protein, 8 aa, SARS-CoV-2
TVEELKKL

SEQ ID NO: 1403 - protein, 16 aa, SARS-CoV-2
ITREEAIRHVRAWIGF

SEQ ID NO: 1404 - protein, 16 aa, SARS-CoV-2
ITISSFKWDLTAFGLV

SEQ ID NO: 1405 - protein, 16 aa, SARS-CoV-2
ITISSFKWDLTAFGLV

SEQ ID NO: 1406 - protein, 6 aa, SARS-CoV-2
DPQTLE

SEQ ID NO: 1407 - protein, 16 aa, SARS-CoV-2
ITFDNLKTLLSLREVR

SEQ ID NO: 1408 - protein, 16 aa, SARS-CoV-2
ITFDNLKTLLSLREVR

SEQ ID NO: 1409 - protein, 6 aa, SARS-CoV-2
QQFGRD

SEQ ID NO: 1410 - protein, 16 aa, SARS-CoV-2
KTVGELGDVRETMSYL

SEQ ID NO: 1411 - protein, 16 aa, SARS-CoV-2
KTVGELGDVRETMSYL

SEQ ID NO: 1412 - protein, 16 aa, SARS-CoV-2
STASALGKLQDVVNQN

SEQ ID NO: 1413 - protein, 10 aa, SARS-CoV-2
SSSSDNIALL

SEQ ID NO: 1414 - protein, 16 aa, SARS-CoV-2
IRGGDGKMKDLSPRWY

SEQ ID NO: 1415 - protein, 11 aa, SARS-CoV-2
APRITFGGPSD

SEQ ID NO: 1416 - protein, 14 aa, SARS-CoV-2
VLTESNKKFLPFQQ

SEQ ID NO: 1417 - protein, 13 aa, SARS-CoV-2
DKDPNFKDQVILL

SEQ ID NO: 1418 - protein, 16 aa, SARS-CoV-2
HIDAYKTFPPTEPKKD

SEQ ID NO: 1419 - protein, 16 aa, SARS-CoV-2
TVAAFHQECSLQSCTQ

SEQ ID NO: 1420 - protein, 5 aa, SARS-CoV-2
DFGGF

SEQ ID NO: 1421 - protein, 6 aa, SARS-CoV-2
QGTTLP

SEQ ID NO: 1422 - protein, 6 aa, SARS-CoV-2
FIEDLL

SEQ ID NO: 1423 - protein, 16 aa, SARS-CoV-2
KDEDDNLIDSYFVVKR

SEQ ID NO: 1424 - protein, 15 aa, SARS-CoV-2
ITFGGPSDSTGSNQN

SEQ ID NO: 1425 - protein, 14 aa, SARS-CoV-2
EVRQIAPGQTGKIA

SEQ ID NO: 1426 - protein, 15 aa, SARS-CoV-2
FSRVSAKPPPGDQFK

SEQ ID NO: 1427 - protein, 7 aa, SARS-CoV-2
VAIHADQ

SEQ ID NO: 1428 - protein, 9 aa, SARS-CoV-2
PTWRVYSTG

SEQ ID NO: 1429 - protein, 7 aa, SARS-CoV-2
KEELDKY

SEQ ID NO: 1430 - protein, 11 aa, SARS-CoV-2
SGKGQQQQGQT

SEQ ID NO: 1431 - protein, 6 aa, SARS-CoV-2
KDLPKE

SEQ ID NO: 1432 - protein, 16 aa, SARS-CoV-2
QTRAGCLIGAEHVNNS

SEQ ID NO: 1433 - protein, 16 aa, SARS-CoV-2
VTIAEILLIIMRTFKV

SEQ ID NO: 1434 - protein, 15 aa, SARS-CoV-2
DCALDPLSETKCTLK

SEQ ID NO: 1435 - protein, 14 aa, SARS-CoV-2
KSPIQYIDIGNYTV

SEQ ID NO: 1436 - protein, 7 aa, SARS-CoV-2
AYTMSLG

SEQ ID NO: 1437 - protein, 16 aa, SARS-CoV-2
FNFNGLTGTGVLTESN

SEQ ID NO: 1438 - protein, 16 aa, SARS-CoV-2
IAARDLICAQKFNGLT

SEQ ID NO: 1439 - protein, 4 aa, SARS-CoV-2
RRPQ

SEQ ID NO: 1440 - protein, 13 aa, SARS-CoV-2
GLPYGANKDGIIW

SEQ ID NO: 1441 - protein, 10 aa, SARS-CoV-2
LPQRQKKQQT

SEQ ID NO: 1442 - protein, 12 aa, SARS-CoV-2
GSNVFQTRAGCL

SEQ ID NO: 1443 - protein, 15 aa, SARS-CoV-2
GFNFSQILPDPSKPS

SEQ ID NO: 1444 - protein, 12 aa, SARS-CoV-2
YKLGASQRVAGD

SEQ ID NO: 1445 - protein, 15 aa, SARS-CoV-2
NQLESKMSGKGQQQQ

SEQ ID NO: 1446 - protein, 13 aa, SARS-CoV-2
TVTKKSAAEASKK

SEQ ID NO: 1447 - protein, 16 aa, SARS-CoV-2
PYGANKDGIIWVATEG

SEQ ID NO: 1448 - protein, 16 aa, SARS-CoV-2
KSAPLIELCVDEAGSK

SEQ ID NO: 1449 - protein, 7 aa, SARS-CoV-2
EPIYDEP

SEQ ID NO: 1450 - protein, 14 aa, SARS-CoV-2
TTLEETKFLTENLL

SEQ ID NO: 1451 - protein, 14 aa, SARS-CoV-2
TTLEETKFLTENLL

SEQ ID NO: 1452 - protein, 12 aa, SARS-CoV-2
HTSPDVDLGDIS

SEQ ID NO: 1453 - protein, 15 aa, SARS-CoV-2
NNSYECDIPIGAGIC

SEQ ID NO: 1454 - protein, 16 aa, SARS-CoV-2
GANKDGIIWVATEGAL

SEQ ID NO: 1455 - protein, 16 aa, SARS-CoV-2
AIKLDDKDPNFKDQVI

SEQ ID NO: 1456 - protein, 15 aa, SARS-CoV-2
IVDEPEEHVQIHTID

SEQ ID NO: 1457 - protein, 12 aa, SARS-CoV-2
EAGSKSPIQYID

SEQ ID NO: 1458 - protein, 15 aa, SARS-CoV-2
KDGIIWVATEGALNT

SEQ ID NO: 1459 - protein, 16 aa, SARS-CoV-2
LDGEVITFDNLKTLLS

SEQ ID NO: 1460 - protein, 16 aa, SARS-CoV-2
LDGEVITFDNLKTLLS

SEQ ID NO: 1461 - protein, 16 aa, SARS-CoV-2
FTVEKGIYQTSNFRVQ

SEQ ID NO: 1462 - protein, 16 aa, SARS-CoV-2
LLALHRSYLTPGDSSS

SEQ ID NO: 1463 - protein, 16 aa, SARS-CoV-2
KQGEIKDATPSDFVRA

SEQ ID NO: 1464 - protein, 15 aa, SARS-CoV-2
GDGKMKDLSPRWYFY

SEQ ID NO: 1465 - protein, 15 aa, SARS-CoV-2
KCVNFNFNGLTGTGV

SEQ ID NO: 1466 - protein, 15 aa, SARS-CoV-2
ILPDPSKPSKRSFIE

SEQ ID NO: 1467 - protein, 16 aa, SARS-CoV-2
VDLGDISGINASVVNI

SEQ ID NO: 1468 - protein, 16 aa, SARS-CoV-2
SQPFLMDLEGKQGNFK

SEQ ID NO: 1469 - protein, 16 aa, SARS-CoV-2
KDATPSDFVRATATIP

SEQ ID NO: 1470 - protein, 14 aa, SARS-CoV-2
AAEASKKPRQKRTA

SEQ ID NO: 1471 - protein, 14 aa, SARS-CoV-2
IAVEQDKNTQEVFA

SEQ ID NO: 1472 - protein, 16 aa, SARS-CoV-2
AEVAVKMFDAYVNTFS

SEQ ID NO: 1473 - protein, 16 aa, SARS-CoV-2
NIQKEIDRLNEVAKNL

SEQ ID NO: 1474 - protein, 16 aa, SARS-CoV-2
ECDIPIGAGICASYQT

SEQ ID NO: 1475 - protein, 16 aa, SARS-CoV-2
GEIKDATPSDFVRATA

SEQ ID NO: 1476 - protein, 16 aa, SARS-CoV-2
IAPGQTGKIADYNYKL

SEQ ID NO: 1477 - protein, 16 aa, SARS-CoV-2
TQLNRALTGIAVEQDK

SEQ ID NO: 1478 - protein, 16 aa, SARS-CoV-2
LTLQQIELKFNPPALQ

SEQ ID NO: 1479 - protein, 16 aa, SARS-CoV-2
LTLQQIELKFNPPALQ

SEQ ID NO: 1480 - protein, 15 aa, SARS-CoV-2
PDVDLGDISGINASV

SEQ ID NO: 1481 - protein, 16 aa, SARS-CoV-2
TTVDNINLHTQVVDMS

SEQ ID NO: 1482 - protein, 16 aa, SARS-CoV-2
TTVDNINLHTQVVDMS

SEQ ID NO: 1483 - protein, 16 aa, SARS-CoV-2
YTMADLVYALRHFDEG

SEQ ID NO: 1484 - protein, 24 aa, SARS-CoV-2
MADSNGTITVEELKKLLEQWNLVI

SEQ ID NO: 1485 - protein, 16 aa, SARS-CoV-2
ITREEAIRHVRAWIGF

SEQ ID NO: 1486 - protein, 16 aa, SARS-CoV-2
ITISSFKWDLTAFGLV

SEQ ID NO: 1487 - protein, 16 aa, SARS-CoV-2
ITISSFKWDLTAFGLV

SEQ ID NO: 1488 - protein, 26 aa, SARS-CoV-2
DIADTTDAVRDPQTLEILDITPCSFG

SEQ ID NO: 1489 - protein, 16 aa, SARS-CoV-2
ITFDNLKTLLSLREVR

SEQ ID NO: 1490 - protein, 16 aa, SARS-CoV-2
ITFDNLKTLLSLREVR

SEQ ID NO: 1491 - protein, 26 aa, SARS-CoV-2
TESNKKFLPFQQFGRDIADTTDAVRD

SEQ ID NO: 1492 - protein, 16 aa, SARS-CoV-2
KTVGELGDVRETMSYL

SEQ ID NO: 1493 - protein, 16 aa, SARS-CoV-2
KTVGELGDVRETMSYL

SEQ ID NO: 1494 - protein, 16 aa, SARS-CoV-2
STASALGKLQDVVNQN

SEQ ID NO: 1495 - protein, 18 aa, SARS-CoV-2
KLNTDHSSSSDNIALLVQ

SEQ ID NO: 1496 - protein, 31 aa, SARS-CoV-2; identical to SEQ ID NO: 21

SEQ ID NO: 1497 - protein, 16 aa, SARS-CoV-2
IRGGDGKMKDLSPRWY

SEQ ID NO: 1498 - protein, 21 aa, SARS-CoV-2
QNQRNAPRITFGGPSDSTGSN

SEQ ID NO: 1499 - protein, 18 aa, SARS-CoV-2
TGVLTESNKKFLPFQQFG

SEQ ID NO: 1500 - protein, 19 aa, SARS-CoV-2
KLDDKDPNFKDQVILLNKH

SEQ ID NO: 1501 - protein, 16 aa, SARS-CoV-2
HIDAYKTFPPTEPKKD

SEQ ID NO: 1502 - protein, 16 aa, SARS-CoV-2
TVAAFHQECSLQSCTQ

SEQ ID NO: 1503 - protein, 32 aa, SARS-CoV-2; identical to SEQ ID NO: 27

SEQ ID NO: 1504 - protein, 33 aa, SARS-CoV-2; identical to SEQ ID NO: 18

SEQ ID NO: 1505 - protein, 27 aa, SARS-CoV-2
VKQIYKTPPIKDFGGFNFSQILPDPSK

SEQ ID NO: 1506 - protein, 26 aa, SARS-CoV-2
NNAAIVLQLPQGTTLPKGFYAEGSRG

SEQ ID NO: 1507 - protein, 27 aa, SARS-CoV-2
CCSCGSCCKFDEDDSEPVLKGVKLHYT

SEQ ID NO: 1508 - protein, 26 aa, SARS-CoV-2
PDPSKPSKRSFIEDLLFNKVTLADAG

SEQ ID NO: 1509 - protein, 16 aa, SARS-CoV-2
KDEDDNLIDSYFVVKR

SEQ ID NO: 1510 - protein, 17 aa, SARS-CoV-2
RITFGGPSDSTGSNQNG

SEQ ID NO: 1511 - protein, 18 aa, SARS-CoV-2
GDEVRQIAPGQTGKIADY

SEQ ID NO: 1512 - protein, 17 aa, SARS-CoV-2
DFSRVSAKPPPGDQFKH

SEQ ID NO: 1513 - protein, 25 aa, SARS-CoV-2
QDVNCTEVPVAIHADQLTPTWRVYS

SEQ ID NO: 1514 - protein, 23 aa, SARS-CoV-2
IHADQLTPTWRVYSTGSNVFQTR

SEQ ID NO: 1515 - protein, 25 aa, SARS-CoV-2
PLQPELDSFKEELDKYFKNHTSPDV

SEQ ID NO: 1516 - protein, 21 aa, SARS-CoV-2
LESKMSGKGQQQQGQTVTKKS

SEQ ID NO: 1517 - protein, 26 aa, SARS-CoV-2
AGHHLGRCDIKDLPKEITVATSRTLS

SEQ ID NO: 1518 - protein, 16 aa, SARS-CoV-2
QTRAGCLIGAEHVNNS

SEQ ID NO: 1519 - protein, 16 aa, SARS-CoV-2
VTIAEILLIIMRTFKV

SEQ ID NO: 1520 - protein, 17 aa, SARS-CoV-2
VDCALDPLSETKCTLKS

SEQ ID NO: 1521 - protein, 18 aa, SARS-CoV-2
GSKSPIQYIDIGNYTVSC

SEQ ID NO: 1522 - protein, 25 aa, SARS-CoV-2
RSVASQSIIAYTMSLGAENSVAYSN

SEQ ID NO: 1523 - protein, 16 aa, SARS-CoV-2
FNFNGLTGTGVLTESN

SEQ ID NO: 1524 - protein, 16 aa, SARS-CoV-2
IAARDLICAQKFNGLT

SEQ ID NO: 1525 - protein, 28 aa, SARS-CoV-2
QNGERSGARSKQRRPQGLPNNTASWFTA

SEQ ID NO: 1526 - protein, 19 aa, SARS-CoV-2
PEAGLPYGANKDGIIWVAT

SEQ ID NO: 1527 - protein, 22 aa, SARS-CoV-2
ADETQALPQRQKKQQTVTLLPA

SEQ ID NO: 1528 - protein, 20 aa, SARS-CoV-2
VYSTGSNVFQTRAGCLIGAE

SEQ ID NO: 1529 - protein, 17 aa, SARS-CoV-2
GGFNFSQILPDPSKPSK

SEQ ID NO: 1530 - protein, 20 aa, SARS-CoV-2
TLSYYKLGASQRVAGDSGFA

SEQ ID NO: 1531 - protein, 17 aa, SARS-CoV-2
LNQLESKMSGKGQQQQG

SEQ ID NO: 1532 - protein, 19 aa, SARS-CoV-2
QGQTVTKKSAAEASKKPRQ

SEQ ID NO: 1533 - protein, 16 aa, SARS-CoV-2
PYGANKDGIIWVATEG

SEQ ID NO: 1534 - protein, 16 aa, SARS-CoV-2
KSAPLIELCVDEAGSK

SEQ ID NO: 1535 - protein, 24 aa, SARS-CoV-2
SSGVVNPVMEPIYDEPTTTTSVPL

SEQ ID NO: 1536 - protein, 18 aa, SARS-CoV-2
VTTTLEETKFLTENLLLY

SEQ ID NO: 1537 - protein, 18 aa, SARS-CoV-2
VTTTLEETKFLTENLLLY

SEQ ID NO: 1538 - protein, 20 aa, SARS-CoV-2
YFKNHTSPDVDLGDISGINA

SEQ ID NO: 1539 - protein, 17 aa, SARS-CoV-2
VNNSYECDIPIGAGICA

SEQ ID NO: 1540 - protein, 16 aa, SARS-CoV-2
GANKDGIIWVATEGAL

SEQ ID NO: 1541 - protein, 16 aa, SARS-CoV-2
AIKLDDKDPNFKDQVI

SEQ ID NO: 1542 - protein, 17 aa, SARS-CoV-2
KIVDEPEEHVQIHTIDG

SEQ ID NO: 1543 - protein, 20 aa, SARS-CoV-2
LCVDEAGSKSPIQYIDIGNY

SEQ ID NO: 1544 - protein, 17 aa, SARS-CoV-2
NKDGIIWVATEGALNTP

SEQ ID NO: 1545 - protein, 16 aa, SARS-CoV-2
LDGEVITFDNLKTLLS

SEQ ID NO: 1546 - protein, 16 aa, SARS-CoV-2
LDGEVITFDNLKTLLS

SEQ ID NO: 1547 - protein, 16 aa, SARS-CoV-2
FTVEKGIYQTSNFRVQ

SEQ ID NO: 1548 - protein, 16 aa, SARS-CoV-2
LLALHRSYLTPGDSSS

SEQ ID NO: 1549 - protein, 16 aa, SARS-CoV-2
KQGEIKDATPSDFVRA

SEQ ID NO: 1550 - protein, 17 aa, SARS-CoV-2
GGDGKMKDLSPRWYFYY

SEQ ID NO: 1551 - protein, 17 aa, SARS-CoV-2
NKCVNFNFNGLTGTGVL

SEQ ID NO: 1552 - protein, 17 aa, SARS-CoV-2
QILPDPSKPSKRSFIED

SEQ ID NO: 1553 - protein, 16 aa, SARS-CoV-2
VDLGDISGINASVVNI

SEQ ID NO: 1554 - protein, 16 aa, SARS-CoV-2
SQPFLMDLEGKQGNFK

SEQ ID NO: 1555 - protein, 16 aa, SARS-CoV-2
KDATPSDFVRATATIP

SEQ ID NO: 1556 - protein, 18 aa, SARS-CoV-2
KSAAEASKKPRQKRTATK

SEQ ID NO: 1557 - protein, 18 aa, SARS-CoV-2
TGIAVEQDKNTQEVFAQV

SEQ ID NO: 1558 - protein, 16 aa, SARS-CoV-2
AEVAVKMFDAYVNTFS

SEQ ID NO: 1559 - protein, 16 aa, SARS-CoV-2
NIQKEIDRLNEVAKNL

SEQ ID NO: 1560 - protein, 16 aa, SARS-CoV-2
ECDIPIGAGICASYQT

SEQ ID NO: 1561 - protein, 16 aa, SARS-CoV-2
GEIKDATPSDFVRATA

SEQ ID NO: 1562 - protein, 16 aa, SARS-CoV-2
IAPGQTGKIADYNYKL

SEQ ID NO: 1563 - protein, 16 aa, SARS-CoV-2
TQLNRALTGIAVEQDK

SEQ ID NO: 1564 - protein, 16 aa, SARS-CoV-2
LTLQQIELKFNPPALQ

SEQ ID NO: 1565 - protein, 16 aa, SARS-CoV-2
LTLQQIELKFNPPALQ

SEQ ID NO: 1566 - protein, 17 aa, SARS-CoV-2
SPDVDLGDISGINASVV

SEQ ID NO: 1567 - protein, 16 aa, SARS-CoV-2
TTVDNINLHTQVVDMS

SEQ ID NO: 1568 - protein, 16 aa, SARS-CoV-2
TTVDNINLHTQVVDMS

SEQ ID NO: 1569 - protein, 16 aa, SARS-CoV-2
YTMADLVYALRHFDEG

SEQ ID NO: 1570 - protein, 16 aa, SARS-CoV-2
MADSNGTITVEELKKL

SEQ ID NO: 1571 - protein, 16 aa, SARS-CoV-2
TITVEELKKLLEQWNL

SEQ ID NO: 1572 - protein, 16 aa, SARS-CoV-2
ITREEAIRHVRAWIGF

SEQ ID NO: 1573 - protein, 16 aa, SARS-CoV-2
ITISSFKWDLTAFGLV

SEQ ID NO: 1574 - protein, 16 aa, SARS-CoV-2
ITISSFKWDLTAFGLV

SEQ ID NO: 1575 - protein, 16 aa, SARS-CoV-2
DIADTTDAVRDPQTLE

SEQ ID NO: 1576 - protein, 16 aa, SARS-CoV-2
DAVRDPQTLEILDITP

SEQ ID NO: 1577 - protein, 16 aa, SARS-CoV-2
ITFDNLKTLLSLREVR

SEQ ID NO: 1578 - protein, 16 aa, SARS-CoV-2
ITFDNLKTLLSLREVR

SEQ ID NO: 1579 - protein, 16 aa, SARS-CoV-2
TESNKKFLPFQQFGRD

SEQ ID NO: 1580 - protein, 16 aa, SARS-CoV-2
FLPFQQFGRDIADTTD

SEQ ID NO: 1581 - protein, 16 aa, SARS-CoV-2
KTVGELGDVRETMSYL

SEQ ID NO: 1582 - protein, 16 aa, SARS-CoV-2
KTVGELGDVRETMSYL

SEQ ID NO: 1583 - protein, 16 aa, SARS-CoV-2
STASALGKLQDVVNQN

SEQ ID NO: 1584 - protein, 16 aa, SARS-CoV-2
KLNTDHSSSSDNIALL

SEQ ID NO: 1585 - protein, 12 aa, SARS-CoV-2
SSSSDNIALLVQ

SEQ ID NO: 1586 - protein, 16 aa, SARS-CoV-2
ARMAGNGGDAALALLL

SEQ ID NO: 1587 - protein, 16 aa, SARS-CoV-2
GGDAALALLLLDRLNQ

SEQ ID NO: 1588 - protein, 16 aa, SARS-CoV-2
IRGGDGKMKDLSPRWY

SEQ ID NO: 1589 - protein, 16 aa, SARS-CoV-2
QNQRNAPRITFGGPSD

SEQ ID NO: 1590 - protein, 16 aa, SARS-CoV-2
TGVLTESNKKFLPFQQ

SEQ ID NO: 1591 - protein, 16 aa, SARS-CoV-2
KLDDKDPNFKDQVILL

SEQ ID NO: 1592 - protein, 16 aa, SARS-CoV-2
HIDAYKTFPPTEPKKD

SEQ ID NO: 1593 - protein, 16 aa, SARS-CoV-2
TVAAFHQECSLQSCTQ

SEQ ID NO: 1594 - protein, 16 aa, SARS-CoV-2
LGASQRVAGDSGFAAY

SEQ ID NO: 1595 - protein, 16 aa, SARS-CoV-2
VAGDSGFAAYSRYRIG

SEQ ID NO: 1596 - protein, 16 aa, SARS-CoV-2
FAAYSRYRIGNYKLNT

SEQ ID NO: 1597 - protein, 16 aa, SARS-CoV-2
QRQKKQQTVTLLPAAD

SEQ ID NO: 1598 - protein, 16 aa, SARS-CoV-2
QTVTLLPAADLDDFSK

SEQ ID NO: 1599 - protein, 16 aa, SARS-CoV-2
PAADLDDFSKQLQQSM

SEQ ID NO: 1600 - protein, 16 aa, SARS-CoV-2
VKQIYKTPPIKDFGGF

SEQ ID NO: 1601 - protein, 16 aa, SARS-CoV-2
TPPIKDFGGFNFSQIL

SEQ ID NO: 1602 - protein, 16 aa, SARS-CoV-2
NNAAIVLQLPQGTTLP

SEQ ID NO: 1603 - protein, 16 aa, SARS-CoV-2
LQLPQGTTLPKGFYAE

SEQ ID NO: 1604 - protein, 16 aa, SARS-CoV-2
CCSCGSCCKFDEDDSE

SEQ ID NO: 1605 - protein, 16 aa, SARS-CoV-2
CCKFDEDDSEPVLKGV

SEQ ID NO: 1606 - protein, 15 aa, SARS-CoV-2
DDSEPVLKGVKLHYT

SEQ ID NO: 1607 - protein, 16 aa, SARS-CoV-2
PDPSKPSKRSFIEDLL

SEQ ID NO: 1608 - protein, 16 aa, SARS-CoV-2
SKRSFIEDLLFNKVTL

SEQ ID NO: 1609 - protein, 16 aa, SARS-CoV-2
KDEDDNLIDSYFVVKR

SEQ ID NO: 1610 - protein, 16 aa, SARS-CoV-2
RITFGGPSDSTGSNQN

SEQ ID NO: 1611 - protein, 16 aa, SARS-CoV-2
GDEVRQIAPGQTGKIA

SEQ ID NO: 1612 - protein, 16 aa, SARS-CoV-2
DFSRVSAKPPPGDQFK

SEQ ID NO: 1613 - protein, 16 aa, SARS-CoV-2
QDVNCTEVPVAIHADQ

SEQ ID NO: 1614 - protein, 16 aa, SARS-CoV-2
EVPVAIHADQLTPTWR

SEQ ID NO: 1615 - protein, 16 aa, SARS-CoV-2
IHADQLTPTWRVYSTG

SEQ ID NO: 1616 - protein, 16 aa, SARS-CoV-2
TPTWRVYSTGSNVFQT

SEQ ID NO: 1617 - protein, 16 aa, SARS-CoV-2
PLQPELDSFKEELDKY

SEQ ID NO: 1618 - protein, 16 aa, SARS-CoV-2
DSFKEELDKYFKNHTS

SEQ ID NO: 1619 - protein, 16 aa, SARS-CoV-2
LESKMSGKGQQQQGQT

SEQ ID NO: 1620 - protein, 16 aa, SARS-CoV-2
AGHHLGRCDIKDLPKE

SEQ ID NO: 1621 - protein, 16 aa, SARS-CoV-2
RCDIKDLPKEITVATS

SEQ ID NO: 1622 - protein, 16 aa, SARS-CoV-2
QTRAGCLIGAEHVNNS

SEQ ID NO: 1623 - protein, 16 aa, SARS-CoV-2
VTIAEILLIIMRTFKV

SEQ ID NO: 1624 - protein, 16 aa, SARS-CoV-2
VDCALDPLSETKCTLK

SEQ ID NO: 1625 - protein, 16 aa, SARS-CoV-2
GSKSPIQYIDIGNYTV

SEQ ID NO: 1626 - protein, 16 aa, SARS-CoV-2
RSVASQSIIAYTMSLG

SEQ ID NO: 1627 - protein, 16 aa, SARS-CoV-2
SIIAYTMSLGAENSVA

SEQ ID NO: 1628 - protein, 16 aa, SARS-CoV-2
FNFNGLTGTGVLTESN

SEQ ID NO: 1629 - protein, 16 aa, SARS-CoV-2
IAARDLICAQKFNGLT

SEQ ID NO: 1630 - protein, 16 aa, SARS-CoV-2
QNGERSGARSKQRRPQ

SEQ ID NO: 1631 - protein, 16 aa, SARS-CoV-2
GARSKQRRPQGLPNNT

SEQ ID NO: 1632 - protein, 16 aa, SARS-CoV-2
RRPQGLPNNTASWFTA

SEQ ID NO: 1633 - protein, 16 aa, SARS-CoV-2
PEAGLPYGANKDGIIW

SEQ ID NO: 1634 - protein, 16 aa, SARS-CoV-2
ADETQALPQRQKKQQT

SEQ ID NO: 1635 - protein, 16 aa, SARS-CoV-2
LPQRQKKQQTVTLLPA

SEQ ID NO: 1636 - protein, 16 aa, SARS-CoV-2
VYSTGSNVFQTRAGCL

SEQ ID NO: 1637 - protein, 16 aa, SARS-CoV-2
GGFNFSQILPDPSKPS

SEQ ID NO: 1638 - protein, 16 aa, SARS-CoV-2
TLSYYKLGASQRVAGD

SEQ ID NO: 1639 - protein, 16 aa, SARS-CoV-2
LNQLESKMSGKGQQQQ

SEQ ID NO: 1640 - protein, 16 aa, SARS-CoV-2
QGQTVTKKSAAEASKK

SEQ ID NO: 1641 - protein, 16 aa, SARS-CoV-2
PYGANKDGIIWVATEG

SEQ ID NO: 1642 - protein, 16 aa, SARS-CoV-2
KSAPLIELCVDEAGSK

SEQ ID NO: 1643 - protein, 16 aa, SARS-CoV-2
SSGVVNPVMEPIYDEP

SEQ ID NO: 1644 - protein, 16 aa, SARS-CoV-2
PVMEPIYDEPTTTTSV

SEQ ID NO: 1645 - protein, 16 aa, SARS-CoV-2
VTTTLEETKFLTENLL

SEQ ID NO: 1646 - protein, 16 aa, SARS-CoV-2
VTTTLEETKFLTENLL

SEQ ID NO: 1647 - protein, 16 aa, SARS-CoV-2
YFKNHTSPDVDLGDIS

SEQ ID NO: 1648 - protein, 16 aa, SARS-CoV-2
VNNSYECDIPIGAGIC

SEQ ID NO: 1649 - protein, 16 aa, SARS-CoV-2
GANKDGIIWVATEGAL

SEQ ID NO: 1650 - protein, 16 aa, SARS-CoV-2
AIKLDDKDPNFKDQVI

SEQ ID NO: 1651 - protein, 16 aa, SARS-CoV-2
KIVDEPEEHVQIHTID

SEQ ID NO: 1652 - protein, 16 aa, SARS-CoV-2
LCVDEAGSKSPIQYID

SEQ ID NO: 1653 - protein, 16 aa, SARS-CoV-2
NKDGIIWVATEGALNT

SEQ ID NO: 1654 - protein, 16 aa, SARS-CoV-2
LDGEVITFDNLKTLLS

SEQ ID NO: 1655 - protein, 16 aa, SARS-CoV-2
LDGEVITFDNLKTLLS

SEQ ID NO: 1656 - protein, 16 aa, SARS-CoV-2
FTVEKGIYQTSNFRVQ

SEQ ID NO: 1657 - protein, 16 aa, SARS-CoV-2
LLALHRSYLTPGDSSS

SEQ ID NO: 1658 - protein, 16 aa, SARS-CoV-2
KQGEIKDATPSDFVRA

SEQ ID NO: 1659 - protein, 16 aa, SARS-CoV-2
GGDGKMKDLSPRWYFY

SEQ ID NO: 1660 - protein, 16 aa, SARS-CoV-2
NKCVNFNFNGLTGTGV

SEQ ID NO: 1661 - protein, 16 aa, SARS-CoV-2
QILPDPSKPSKRSFIE

SEQ ID NO: 1662 - protein, 16 aa, SARS-CoV-2
VDLGDISGINASVVNI

SEQ ID NO: 1663 - protein, 16 aa, SARS-CoV-2
SQPFLMDLEGKQGNFK

SEQ ID NO: 1664 - protein, 16 aa, SARS-CoV-2
KDATPSDFVRATATIP

SEQ ID NO: 1665 - protein, 16 aa, SARS-CoV-2
KSAAEASKKPRQKRTA

SEQ ID NO: 1666 - protein, 16 aa, SARS-CoV-2
TGIAVEQDKNTQEVFA

SEQ ID NO: 1667 - protein, 16 aa, SARS-CoV-2
AEVAVKMFDAYVNTFS

SEQ ID NO: 1668 - protein, 16 aa, SARS-CoV-2
NIQKEIDRLNEVAKNL

SEQ ID NO: 1669 - protein, 16 aa, SARS-CoV-2
ECDIPIGAGICASYQT

SEQ ID NO: 1670 - protein, 16 aa, SARS-CoV-2
GEIKDATPSDFVRATA

SEQ ID NO: 1671 - protein, 16 aa, SARS-CoV-2
IAPGQTGKIADYNYKL

SEQ ID NO: 1672 - protein, 16 aa, SARS-CoV-2
TQLNRALTGIAVEQDK

SEQ ID NO: 1673 - protein, 16 aa, SARS-CoV-2
LTLQQIELKFNPPALQ

SEQ ID NO: 1674 - protein, 16 aa, SARS-CoV-2
LTLQQIELKFNPPALQ

SEQ ID NO: 1675 - protein, 16 aa, SARS-CoV-2
SPDVDLGDISGINASV

SEQ ID NO: 1676 - protein, 16 aa, SARS-CoV-2
TTVDNINLHTQVVDMS

SEQ ID NO: 1677 - protein, 16 aa, SARS-CoV-2
TTVDNINLHTQVVDMS

SEQ ID NO: 1678 - protein, 16 aa, SARS-CoV-2
ADSNGTITVEELKKLL

SEQ ID NO: 1679 - protein, 16 aa, SARS-CoV-2
ITVEELKKLLEQWNLV

SEQ ID NO: 1680 - protein, 16 aa, SARS-CoV-2
IADTTDAVRDPQTLEI

SEQ ID NO: 1681 - protein, 16 aa, SARS-CoV-2
AVRDPQTLEILDITPC

SEQ ID NO: 1682 - protein, 16 aa, SARS-CoV-2
ESNKKFLPFQQFGRDI

SEQ ID NO: 1683 - protein, 16 aa, SARS-CoV-2
LPFQQFGRDIADTTDA

SEQ ID NO: 1684 - protein, 16 aa, SARS-CoV-2
LNTDHSSSSDNIALLV

SEQ ID NO: 1685 - protein, 16 aa, SARS-CoV-2
RMAGNGGDAALALLLL

SEQ ID NO: 1686 - protein, 16 aa, SARS-CoV-2
GDAALALLLLDRLNQL

SEQ ID NO: 1687 - protein, 16 aa, SARS-CoV-2
ALLLLDRLNQLESKMS

SEQ ID NO: 1688 - protein, 16 aa, SARS-CoV-2
NQRNAPRITFGGPSDS

SEQ ID NO: 1689 - protein, 16 aa, SARS-CoV-2
GVLTESNKKFLPFQQF

SEQ ID NO: 1690 - protein, 16 aa, SARS-CoV-2
LDDKDPNFKDQVILLN

SEQ ID NO: 1691 - protein, 16 aa, SARS-CoV-2
GASQRVAGDSGFAAYS

SEQ ID NO: 1692 - protein, 16 aa, SARS-CoV-2
AGDSGFAAYSRYRIGN

SEQ ID NO: 1693 - protein, 16 aa, SARS-CoV-2
AAYSRYRIGNYKLNTD

SEQ ID NO: 1694 - protein, 16 aa, SARS-CoV-2
RQKKQQTVTLLPAADL

SEQ ID NO: 1695 - protein, 16 aa, SARS-CoV-2
TVTLLPAADLDDFSKQ

SEQ ID NO: 1696 - protein, 16 aa, SARS-CoV-2
AADLDDFSKQLQQSMS

SEQ ID NO: 1697 - protein, 16 aa, SARS-CoV-2
KQIYKTPPIKDFGGFN

SEQ ID NO: 1698 - protein, 16 aa, SARS-CoV-2
PPIKDFGGFNFSQILP

SEQ ID NO: 1699 - protein, 16 aa, SARS-CoV-2
NAAIVLQLPQGTTLPK

SEQ ID NO: 1700 - protein, 16 aa, SARS-CoV-2
QLPQGTTLPKGFYAEG

SEQ ID NO: 1701 - protein, 16 aa, SARS-CoV-2
CSCGSCCKFDEDDSEP

SEQ ID NO: 1702 - protein, 16 aa, SARS-CoV-2
CKFDEDDSEPVLKGVK

SEQ ID NO: 1703 - protein, 14 aa, SARS-CoV-2
DSEPVLKGVKLHYT

SEQ ID NO: 1704 - protein, 16 aa, SARS-CoV-2
DPSKPSKRSFIEDLLF

SEQ ID NO: 1705 - protein, 16 aa, SARS-CoV-2
KRSFIEDLLFNKVTLA

SEQ ID NO: 1706 - protein, 16 aa, SARS-CoV-2
ITFGGPSDSTGSNQNG

SEQ ID NO: 1707 - protein, 16 aa, SARS-CoV-2
DEVRQIAPGQTGKIAD

SEQ ID NO: 1708 - protein, 16 aa, SARS-CoV-2
FSRVSAKPPPGDQFKH

SEQ ID NO: 1709 - protein, 16 aa, SARS-CoV-2
DVNCTEVPVAIHADQL

SEQ ID NO: 1710 - protein, 16 aa, SARS-CoV-2
VPVAIHADQLTPTWRV

SEQ ID NO: 1711 - protein, 16 aa, SARS-CoV-2
HADQLTPTWRVYSTGS

SEQ ID NO: 1712 - protein, 16 aa, SARS-CoV-2
PTWRVYSTGSNVFQTR

SEQ ID NO: 1713 - protein, 16 aa, SARS-CoV-2
LQPELDSFKEELDKYF

SEQ ID NO: 1714 - protein, 16 aa, SARS-CoV-2
SFKEELDKYFKNHTSP

SEQ ID NO: 1715 - protein, 16 aa, SARS-CoV-2
ESKMSGKGQQQQGQTV

SEQ ID NO: 1716 - protein, 16 aa, SARS-CoV-2
GHHLGRCDIKDLPKEI

SEQ ID NO: 1717 - protein, 16 aa, SARS-CoV-2
CDIKDLPKEITVATSR

SEQ ID NO: 1718 - protein, 16 aa, SARS-CoV-2
DCALDPLSETKCTLKS

SEQ ID NO: 1719 - protein, 16 aa, SARS-CoV-2
SKSPIQYIDIGNYTVS

SEQ ID NO: 1720 - protein, 16 aa, SARS-CoV-2
SVASQSIIAYTMSLGA

SEQ ID NO: 1721 - protein, 16 aa, SARS-CoV-2
IIAYTMSLGAENSVAY

SEQ ID NO: 1722 - protein, 16 aa, SARS-CoV-2
NGERSGARSKQRRPQG

SEQ ID NO: 1723 - protein, 16 aa, SARS-CoV-2
ARSKQRRPQGLPNNTA

SEQ ID NO: 1724 - protein, 16 aa, SARS-CoV-2
EAGLPYGANKDGIIWV

SEQ ID NO: 1725 - protein, 16 aa, SARS-CoV-2
DETQALPQRQKKQQTV

SEQ ID NO: 1726 - protein, 16 aa, SARS-CoV-2
YSTGSNVFQTRAGCLI

SEQ ID NO: 1727 - protein, 16 aa, SARS-CoV-2
GFNFSQILPDPSKPSK

SEQ ID NO: 1728 - protein, 16 aa, SARS-CoV-2
LSYYKLGASQRVAGDS

SEQ ID NO: 1729 - protein, 16 aa, SARS-CoV-2
NQLESKMSGKGQQQQG

SEQ ID NO: 1730 - protein, 16 aa, SARS-CoV-2
GQTVTKKSAAEASKKP

SEQ ID NO: 1731 - protein, 16 aa, SARS-CoV-2
SGVVNPVMEPIYDEPT

SEQ ID NO: 1732 - protein, 16 aa, SARS-CoV-2
VMEPIYDEPTTTTSVP

SEQ ID NO: 1733 - protein, 16 aa, SARS-CoV-2
TTTLEETKFLTENLLL

SEQ ID NO: 1734 - protein, 16 aa, SARS-CoV-2
TTTLEETKFLTENLLL

SEQ ID NO: 1735 - protein, 16 aa, SARS-CoV-2
FKNHTSPDVDLGDISG

SEQ ID NO: 1736 - protein, 16 aa, SARS-CoV-2
NNSYECDIPIGAGICA

SEQ ID NO: 1737 - protein, 16 aa, SARS-CoV-2
IVDEPEEHVQIHTIDG

SEQ ID NO: 1738 - protein, 16 aa, SARS-CoV-2
CVDEAGSKSPIQYIDI

SEQ ID NO: 1739 - protein, 16 aa, SARS-CoV-2
KDGIIWVATEGALNTP

SEQ ID NO: 1740 - protein, 16 aa, SARS-CoV-2
GDGKMKDLSPRWYFYY

SEQ ID NO: 1741 - protein, 16 aa, SARS-CoV-2
KCVNFNFNGLTGTGVL

SEQ ID NO: 1742 - protein, 16 aa, SARS-CoV-2
ILPDPSKPSKRSFIED

SEQ ID NO: 1743 - protein, 16 aa, SARS-CoV-2
SAAEASKKPRQKRTAT

SEQ ID NO: 1744 - protein, 16 aa, SARS-CoV-2
GIAVEQDKNTQEVFAQ

SEQ ID NO: 1745 - protein, 16 aa, SARS-CoV-2
PDVDLGDISGINASVV

SEQ ID NO: 1746 - protein, 16 aa, SARS-CoV-2
DSNGTITVEELKKLLE

SEQ ID NO: 1747 - protein, 16 aa, SARS-CoV-2
TVEELKKLLEQWNLVI

SEQ ID NO: 1748 - protein, 16 aa, SARS-CoV-2
ADTTDAVRDPQTLEIL

SEQ ID NO: 1749 - protein, 16 aa, SARS-CoV-2
VRDPQTLEILDITPCS

SEQ ID NO: 1750 - protein, 16 aa, SARS-CoV-2
SNKKFLPFQQFGRDIA

SEQ ID NO: 1751 - protein, 16 aa, SARS-CoV-2
PFQQFGRDIADTTDAV

SEQ ID NO: 1752 - protein, 16 aa, SARS-CoV-2
NTDHSSSSDNIALLVQ

SEQ ID NO: 1753 - protein, 16 aa, SARS-CoV-2
MAGNGGDAALALLLLD

SEQ ID NO: 1754 - protein, 16 aa, SARS-CoV-2
DAALALLLLDRLNQLE

SEQ ID NO: 1755 - protein, 16 aa, SARS-CoV-2
LLLLDRLNQLESKMSG

SEQ ID NO: 1756 - protein, 16 aa, SARS-CoV-2
QRNAPRITFGGPSDST

SEQ ID NO: 1757 - protein, 16 aa, SARS-CoV-2
VLTESNKKFLPFQQFG

SEQ ID NO: 1758 - protein, 16 aa, SARS-CoV-2
DDKDPNFKDQVILLNK

SEQ ID NO: 1759 - protein, 16 aa, SARS-CoV-2
ASQRVAGDSGFAAYSR

SEQ ID NO: 1760 - protein, 16 aa, SARS-CoV-2
GDSGFAAYSRYRIGNY

SEQ ID NO: 1761 - protein, 16 aa, SARS-CoV-2
AYSRYRIGNYKLNTDH

SEQ ID NO: 1762 - protein, 16 aa, SARS-CoV-2
QKKQQTVTLLPAADLD

SEQ ID NO: 1763 - protein, 16 aa, SARS-CoV-2
VTLLPAADLDDFSKQL

SEQ ID NO: 1764 - protein, 16 aa, SARS-CoV-2
ADLDDFSKQLQQSMSS

SEQ ID NO: 1765 - protein, 16 aa, SARS-CoV-2
QIYKTPPIKDFGGFNF

SEQ ID NO: 1766 - protein, 16 aa, SARS-CoV-2
PIKDFGGFNFSQILPD

SEQ ID NO: 1767 - protein, 16 aa, SARS-CoV-2
AAIVLQLPQGTTLPKG

SEQ ID NO: 1768 - protein, 16 aa, SARS-CoV-2
LPQGTTLPKGFYAEGS

SEQ ID NO: 1769 - protein, 16 aa, SARS-CoV-2
SCGSCCKFDEDDSEPV

SEQ ID NO: 1770 - protein, 16 aa, SARS-CoV-2
KFDEDDSEPVLKGVKL

SEQ ID NO: 1771 - protein, 13 aa, SARS-CoV-2
SEPVLKGVKLHYT

SEQ ID NO: 1772 - protein, 16 aa, SARS-CoV-2
PSKPSKRSFIEDLLFN

SEQ ID NO: 1773 - protein, 16 aa, SARS-CoV-2
RSFIEDLLFNKVTLAD

SEQ ID NO: 1774 - protein, 16 aa, SARS-CoV-2
EVRQIAPGQTGKIADY

SEQ ID NO: 1775 - protein, 16 aa, SARS-CoV-2
VNCTEVPVAIHADQLT

SEQ ID NO: 1776 - protein, 16 aa, SARS-CoV-2
PVAIHADQLTPTWRVY

SEQ ID NO: 1777 - protein, 16 aa, SARS-CoV-2
ADQLTPTWRVYSTGSN

SEQ ID NO: 1778 - protein, 16 aa, SARS-CoV-2
QPELDSFKEELDKYFK

SEQ ID NO: 1779 - protein, 16 aa, SARS-CoV-2
FKEELDKYFKNHTSPD

SEQ ID NO: 1780 - protein, 16 aa, SARS-CoV-2
SKMSGKGQQQQGQTVT

SEQ ID NO: 1781 - protein, 16 aa, SARS-CoV-2
HHLGRCDIKDLPKEIT

SEQ ID NO: 1782 - protein, 16 aa, SARS-CoV-2
DIKDLPKEITVATSRT

SEQ ID NO: 1783 - protein, 16 aa, SARS-CoV-2
KSPIQYIDIGNYTVSC

SEQ ID NO: 1784 - protein, 16 aa, SARS-CoV-2
VASQSIIAYTMSLGAE

SEQ ID NO: 1785 - protein, 16 aa, SARS-CoV-2
IAYTMSLGAENSVAYS

SEQ ID NO: 1786 - protein, 16 aa, SARS-CoV-2
GERSGARSKQRRPQGL

SEQ ID NO: 1787 - protein, 16 aa, SARS-CoV-2
RSKQRRPQGLPNNTAS

SEQ ID NO: 1788 - protein, 16 aa, SARS-CoV-2
AGLPYGANKDGIIWVA

SEQ ID NO: 1789 - protein, 16 aa, SARS-CoV-2
ETQALPQRQKKQQTVT

SEQ ID NO: 1790 - protein, 16 aa, SARS-CoV-2
STGSNVFQTRAGCLIG

SEQ ID NO: 1791 - protein, 16 aa, SARS-CoV-2
SYYKLGASQRVAGDSG

SEQ ID NO: 1792 - protein, 16 aa, SARS-CoV-2
QTVTKKSAAEASKKPR

SEQ ID NO: 1793 - protein, 16 aa, SARS-CoV-2
GVVNPVMEPIYDEPTT

SEQ ID NO: 1794 - protein, 16 aa, SARS-CoV-2
MEPIYDEPTTTTSVPL

SEQ ID NO: 1795 - protein, 16 aa, SARS-CoV-2
TTLEETKFLTENLLLY

SEQ ID NO: 1796 - protein, 16 aa, SARS-CoV-2
TTLEETKFLTENLLLY

SEQ ID NO: 1797 - protein, 16 aa, SARS-CoV-2
KNHTSPDVDLGDISGI

SEQ ID NO: 1798 - protein, 16 aa, SARS-CoV-2
VDEAGSKSPIQYIDIG

SEQ ID NO: 1799 - protein, 16 aa, SARS-CoV-2
AAEASKKPRQKRTATK

SEQ ID NO: 1800 - protein, 16 aa, SARS-CoV-2
IAVEQDKNTQEVFAQV

SEQ ID NO: 1801 - protein, 16 aa, SARS-CoV-2
SNGTITVEELKKLLEQ

SEQ ID NO: 1802 - protein, 16 aa, SARS-CoV-2
DTTDAVRDPQTLEILD

SEQ ID NO: 1803 - protein, 16 aa, SARS-CoV-2
RDPQTLEILDITPCSF

SEQ ID NO: 1804 - protein, 16 aa, SARS-CoV-2
NKKFLPFQQFGRDIAD

SEQ ID NO: 1805 - protein, 16 aa, SARS-CoV-2
FQQFGRDIADTTDAVR

SEQ ID NO: 1806 - protein, 15 aa, SARS-CoV-2
TDHSSSSDNIALLVQ

SEQ ID NO: 1807 - protein, 16 aa, SARS-CoV-2
AGNGGDAALALLLLDR

SEQ ID NO: 1808 - protein, 16 aa, SARS-CoV-2
AALALLLLDRLNQLES

SEQ ID NO: 1809 - protein, 16 aa, SARS-CoV-2
LLLDRLNQLESKMSGK

SEQ ID NO: 1810 - protein, 16 aa, SARS-CoV-2
RNAPRITFGGPSDSTG

SEQ ID NO: 1811 - protein, 16 aa, SARS-CoV-2
DKDPNFKDQVILLNKH

SEQ ID NO: 1812 - protein, 16 aa, SARS-CoV-2
SQRVAGDSGFAAYSRY

SEQ ID NO: 1813 - protein, 16 aa, SARS-CoV-2
DSGFAAYSRYRIGNYK

SEQ ID NO: 1814 - protein, 16 aa, SARS-CoV-2
YSRYRIGNYKLNTDHS

SEQ ID NO: 1815 - protein, 16 aa, SARS-CoV-2
KKQQTVTLLPAADLDD

SEQ ID NO: 1816 - protein, 16 aa, SARS-CoV-2
TLLPAADLDDFSKQLQ

SEQ ID NO: 1817 - protein, 16 aa, SARS-CoV-2
DLDDFSKQLQQSMSSA

SEQ ID NO: 1818 - protein, 16 aa, SARS-CoV-2
IYKTPPIKDFGGFNFS

SEQ ID NO: 1819 - protein, 16 aa, SARS-CoV-2
IKDFGGFNFSQILPDP

SEQ ID NO: 1820 - protein, 16 aa, SARS-CoV-2
AIVLQLPQGTTLPKGF

SEQ ID NO: 1821 - protein, 16 aa, SARS-CoV-2
PQGTTLPKGFYAEGSR

SEQ ID NO: 1822 - protein, 16 aa, SARS-CoV-2
CGSCCKFDEDDSEPVL

SEQ ID NO: 1823 - protein, 16 aa, SARS-CoV-2
FDEDDSEPVLKGVKLH

SEQ ID NO: 1824 - protein, 12 aa, SARS-CoV-2
EPVLKGVKLHYT

SEQ ID NO: 1825 - protein, 16 aa, SARS-CoV-2
SKPSKRSFIEDLLFNK

SEQ ID NO: 1826 - protein, 16 aa, SARS-CoV-2
SFIEDLLFNKVTLADA

SEQ ID NO: 1827 - protein, 16 aa, SARS-CoV-2
NCTEVPVAIHADQLTP

SEQ ID NO: 1828 - protein, 16 aa, SARS-CoV-2
VAIHADQLTPTWRVYS

SEQ ID NO: 1829 - protein, 16 aa, SARS-CoV-2
DQLTPTWRVYSTGSNV

SEQ ID NO: 1830 - protein, 16 aa, SARS-CoV-2
PELDSFKEELDKYFKN

SEQ ID NO: 1831 - protein, 16 aa, SARS-CoV-2
KEELDKYFKNHTSPDV

SEQ ID NO: 1832 - protein, 16 aa, SARS-CoV-2
KMSGKGQQQQGQTVTK

SEQ ID NO: 1833 - protein, 16 aa, SARS-CoV-2
HLGRCDIKDLPKEITV

SEQ ID NO: 1834 - protein, 16 aa, SARS-CoV-2
IKDLPKEITVATSRTL

SEQ ID NO: 1835 - protein, 16 aa, SARS-CoV-2
ASQSIIAYTMSLGAEN

SEQ ID NO: 1836 - protein, 16 aa, SARS-CoV-2
AYTMSLGAENSVAYSN

SEQ ID NO: 1837 - protein, 16 aa, SARS-CoV-2
ERSGARSKQRRPQGLP

SEQ ID NO: 1838 - protein, 16 aa, SARS-CoV-2
SKQRRPQGLPNNTASW

SEQ ID NO: 1839 - protein, 16 aa, SARS-CoV-2
GLPYGANKDGIIWVAT

SEQ ID NO: 1840 - protein, 16 aa, SARS-CoV-2
TQALPQRQKKQQTVTL

SEQ ID NO: 1841 - protein, 16 aa, SARS-CoV-2
TGSNVFQTRAGCLIGA

SEQ ID NO: 1842 - protein, 16 aa, SARS-CoV-2
YYKLGASQRVAGDSGF

SEQ ID NO: 1843 - protein, 16 aa, SARS-CoV-2
TVTKKSAAEASKKPRQ

SEQ ID NO: 1844 - protein, 16 aa, SARS-CoV-2
VVNPVMEPIYDEPTTT

SEQ ID NO: 1845 - protein, 15 aa, SARS-CoV-2
EPIYDEPTTTTSVPL

SEQ ID NO: 1846 - protein, 16 aa, SARS-CoV-2
NHTSPDVDLGDISGIN

SEQ ID NO: 1847 - protein, 16 aa, SARS-CoV-2
DEAGSKSPIQYIDIGN

SEQ ID NO: 1848 - protein, 16 aa, SARS-CoV-2
NGTITVEELKKLLEQW

SEQ ID NO: 1849 - protein, 16 aa, SARS-CoV-2
TTDAVRDPQTLEILDI

SEQ ID NO: 1850 - protein, 16 aa, SARS-CoV-2
DPQTLEILDITPCSFG

SEQ ID NO: 1851 - protein, 16 aa, SARS-CoV-2
KKFLPFQQFGRDIADT

SEQ ID NO: 1852 - protein, 16 aa, SARS-CoV-2
QQFGRDIADTTDAVRD

SEQ ID NO: 1853 - protein, 14 aa, SARS-CoV-2
DHSSSSDNIALLVQ

SEQ ID NO: 1854 - protein, 16 aa, SARS-CoV-2
GNGGDAALALLLLDRL

SEQ ID NO: 1855 - protein, 16 aa, SARS-CoV-2
ALALLLLDRLNQLESK

SEQ ID NO: 1856 - protein, 16 aa, SARS-CoV-2
LLDRLNQLESKMSGKG

SEQ ID NO: 1857 - protein, 16 aa, SARS-CoV-2
NAPRITFGGPSDSTGS

SEQ ID NO: 1858 - protein, 16 aa, SARS-CoV-2
QRVAGDSGFAAYSRYR

SEQ ID NO: 1859 - protein, 16 aa, SARS-CoV-2
SGFAAYSRYRIGNYKL

SEQ ID NO: 1860 - protein, 16 aa, SARS-CoV-2
SRYRIGNYKLNTDHSS

SEQ ID NO: 1861 - protein, 16 aa, SARS-CoV-2
KQQTVTLLPAADLDDF

SEQ ID NO: 1862 - protein, 16 aa, SARS-CoV-2
LLPAADLDDFSKQLQQ

SEQ ID NO: 1863 - protein, 16 aa, SARS-CoV-2
LDDFSKQLQQSMSSAD

SEQ ID NO: 1864 - protein, 16 aa, SARS-CoV-2
YKTPPIKDFGGFNFSQ

SEQ ID NO: 1865 - protein, 16 aa, SARS-CoV-2
KDFGGFNFSQILPDPS

SEQ ID NO: 1866 - protein, 16 aa, SARS-CoV-2
IVLQLPQGTTLPKGFY

SEQ ID NO: 1867 - protein, 16 aa, SARS-CoV-2
QGTTLPKGFYAEGSRG

SEQ ID NO: 1868 - protein, 16 aa, SARS-CoV-2
GSCCKFDEDDSEPVLK

SEQ ID NO: 1869 - protein, 16 aa, SARS-CoV-2
DEDDSEPVLKGVKLHY

SEQ ID NO: 1870 - protein, 16 aa, SARS-CoV-2
KPSKRSFIEDLLFNKV

SEQ ID NO: 1871 - protein, 16 aa, SARS-CoV-2
FIEDLLFNKVTLADAG

SEQ ID NO: 1872 - protein, 16 aa, SARS-CoV-2
CTEVPVAIHADQLTPT

SEQ ID NO: 1873 - protein, 16 aa, SARS-CoV-2
QLTPTWRVYSTGSNVF

SEQ ID NO: 1874 - protein, 16 aa, SARS-CoV-2
ELDSFKEELDKYFKNH

SEQ ID NO: 1875 - protein, 16 aa, SARS-CoV-2
MSGKGQQQQGQTVTKK

SEQ ID NO: 1876 - protein, 16 aa, SARS-CoV-2
LGRCDIKDLPKEITVA

SEQ ID NO: 1877 - protein, 16 aa, SARS-CoV-2
KDLPKEITVATSRTLS

SEQ ID NO: 1878 - protein, 16 aa, SARS-CoV-2
SQSIIAYTMSLGAENS

SEQ ID NO: 1879 - protein, 16 aa, SARS-CoV-2
RSGARSKQRRPQGLPN

SEQ ID NO: 1880 - protein, 16 aa, SARS-CoV-2
KQRRPQGLPNNTASWF

SEQ ID NO: 1881 - protein, 16 aa, SARS-CoV-2
QALPQRQKKQQTVTLL

SEQ ID NO: 1882 - protein, 16 aa, SARS-CoV-2
GSNVFQTRAGCLIGAE

SEQ ID NO: 1883 - protein, 16 aa, SARS-CoV-2
YKLGASQRVAGDSGFA

SEQ ID NO: 1884 - protein, 16 aa, SARS-CoV-2
VNPVMEPIYDEPTTTT

SEQ ID NO: 1885 - protein, 16 aa, SARS-CoV-2
HTSPDVDLGDISGINA

SEQ ID NO: 1886 - protein, 16 aa, SARS-CoV-2
EAGSKSPIQYIDIGNY

SEQ ID NO: 1887 - protein, 16 aa, SARS-CoV-2
GTITVEELKKLLEQWN

SEQ ID NO: 1888 - protein, 16 aa, SARS-CoV-2
TDAVRDPQTLEILDIT

SEQ ID NO: 1889 - protein, 16 aa, SARS-CoV-2
KFLPFQQFGRDIADTT

SEQ ID NO: 1890 - protein, 13 aa, SARS-CoV-2
HSSSSDNIALLVQ

SEQ ID NO: 1891 - protein, 16 aa, SARS-CoV-2
NGGDAALALLLLDRLN

SEQ ID NO: 1892 - protein, 16 aa, SARS-CoV-2
LALLLLDRLNQLESKM

SEQ ID NO: 1893 - protein, 16 aa, SARS-CoV-2
APRITFGGPSDSTGSN

SEQ ID NO: 1894 - protein, 16 aa, SARS-CoV-2
RVAGDSGFAAYSRYRI

SEQ ID NO: 1895 - protein, 16 aa, SARS-CoV-2
GFAAYSRYRIGNYKLN

SEQ ID NO: 1896 - protein, 16 aa, SARS-CoV-2
QQTVTLLPAADLDDFS

SEQ ID NO: 1897 - protein, 16 aa, SARS-CoV-2
LPAADLDDFSKQLQQS

SEQ ID NO: 1898 - protein, 16 aa, SARS-CoV-2
DDFSKQLQQSMSSADS

SEQ ID NO: 1899 - protein, 16 aa, SARS-CoV-2
KTPPIKDFGGFNFSQI

SEQ ID NO: 1900 - protein, 16 aa, SARS-CoV-2
DFGGFNFSQILPDPSK

SEQ ID NO: 1901 - protein, 16 aa, SARS-CoV-2
VLQLPQGTTLPKGFYA

SEQ ID NO: 1902 - protein, 16 aa, SARS-CoV-2
SCCKFDEDDSEPVLKG

SEQ ID NO: 1903 - protein, 16 aa, SARS-CoV-2
EDDSEPVLKGVKLHYT

SEQ ID NO: 1904 - protein, 16 aa, SARS-CoV-2
PSKRSFIEDLLFNKVT

SEQ ID NO: 1905 - protein, 16 aa, SARS-CoV-2
TEVPVAIHADQLTPTW

SEQ ID NO: 1906 - protein, 16 aa, SARS-CoV-2
LTPTWRVYSTGSNVFQ

SEQ ID NO: 1907 - protein, 16 aa, SARS-CoV-2
LDSFKEELDKYFKNHT

SEQ ID NO: 1908 - protein, 16 aa, SARS-CoV-2
SGKGQQQQGQTVTKKS

SEQ ID NO: 1909 - protein, 16 aa, SARS-CoV-2
GRCDIKDLPKEITVAT

SEQ ID NO: 1910 - protein, 16 aa, SARS-CoV-2
QSIIAYTMSLGAENSV

SEQ ID NO: 1911 - protein, 16 aa, SARS-CoV-2
SGARSKQRRPQGLPNN

SEQ ID NO: 1912 - protein, 16 aa, SARS-CoV-2
QRRPQGLPNNTASWFT

SEQ ID NO: 1913 - protein, 16 aa, SARS-CoV-2
ALPQRQKKQQTVTLLP

SEQ ID NO: 1914 - protein, 16 aa, SARS-CoV-2
NPVMEPIYDEPTTTTS

SEQ ID NO: 1915 - protein, 26 aa, SARS-CoV-2
DIADTTDAVRDPQTLEILDITPCSFG

SEQ ID NO: 1916 - protein, 26 aa, SARS-CoV-2
CSCGSCCKFDEDDSEPVLKGVKLHYT

SEQ ID NO: 1917 - protein, 22 aa, SARS-CoV-2
NKKFLPFQQFGRDIADTTDAVR

SEQ ID NO: 1918 - protein, 24 aa, SARS-CoV-2
DPSKPSKRSFIEDLLFNKVTLADA

SEQ ID NO: 1919 - protein, 21 aa, SARS-CoV-2
PLQPELDSFKEELDKYFKNHT

SEQ ID NO: 1920 - protein, 24 aa, SARS-CoV-2
QIYKTPPIKDFGGFNFSQILPDPS

SEQ ID NO: 1921 - protein, 24 aa, SARS-CoV-2
MADSNGTITVEELKKLLEQWNLVI

SEQ ID NO: 1922 - protein, 32 aa, SARS-CoV-2; identical to SEQ ID NO: 27

SEQ ID NO: 1923 - protein, 21 aa, SARS-CoV-2
GRCDIKDLPKEITVATSRTLS

SEQ ID NO: 1924 - protein, 17 aa, SARS-CoV-2
LNTDHSSSSDNIALLVQ

SEQ ID NO: 1925 - protein, 27 aa, SARS-CoV-2
QKKQQTVTLLPAADLDDFSKQLQQSMS

SEQ ID NO: 1926 - protein, 24 aa, SARS-CoV-2
ARMAGNGGDAALALLLLDRLNQLE

SEQ ID NO: 1927 - protein, 22 aa, SARS-CoV-2
ALALLLLDRLNQLESKMSGKGQ

SEQ ID NO: 1928 - protein, 25 aa, SARS-CoV-2
RLNQLESKMSGKGQQQQGQTVTKKS

SEQ ID NO: 1929 - protein, 26 aa, SARS-CoV-2
DIADTTDAVRDPQTLEILDITPCSFG

SEQ ID NO: 1930 - protein, 26 aa, SARS-CoV-2
CSCGSCCKFDEDDSEPVLKGVKLHYT

SEQ ID NO: 1931 - protein, 22 aa, SARS-CoV-2
NKKFLPFQQFGRDIADTTDAVR

SEQ ID NO: 1932 - protein, 24 aa, SARS-CoV-2
DPSKPSKRSFIEDLLFNKVTLADA

SEQ ID NO: 1933 - protein, 21 aa, SARS-CoV-2
PLQPELDSFKEELDKYFKNHT

SEQ ID NO: 1934 - protein, 24 aa, SARS-CoV-2
QIYKTPPIKDFGGFNFSQILPDPS

SEQ ID NO: 1935 - protein, 24 aa, SARS-CoV-2
MADSNGTITVEELKKLLEQWNLVI

SEQ ID NO: 1936 - protein, 32 aa, SARS-CoV-2; identical to SEQ ID NO: 27

SEQ ID NO: 1937 - protein, 21 aa, SARS-CoV-2
GRCDIKDLPKEITVATSRTLS

SEQ ID NO: 1938 - protein, 27 aa, SARS-CoV-2
QKKQQTVTLLPAADLDDFSKQLQQSMS

SEQ ID NO: 1939 - protein, 24 aa, SARS-CoV-2
ARMAGNGGDAALALLLLDRLNQLE

SEQ ID NO: 1940 - protein, 22 aa, SARS-CoV-2
ALALLLLDRLNQLESKMSGKGQ

SEQ ID NO: 1941 - protein, 16 aa, SARS-CoV-2
YTMADLVYALRHFDEG

SEQ ID NO: 1942 - protein, 16 aa, SARS-CoV-2
MADSNGTITVEELKKL

SEQ ID NO: 1943 - protein, 16 aa, SARS-CoV-2
QKKQQTVTLLPAADLD

SEQ ID NO: 1944 - protein, 16 aa, SARS-CoV-2
QIYKTPPIKDFGGFNF

SEQ ID NO: 1945 - protein, 16 aa, SARS-CoV-2
DIADTTDAVRDPQTLE

SEQ ID NO: 1946 - protein, 16 aa, SARS-CoV-2
LQPELDSFKEELDKYF

SEQ ID NO: 1947 - protein, 16 aa, SARS-CoV-2
ARMAGNGGDAALALLL

SEQ ID NO: 1948 - protein, 16 aa, SARS-CoV-2
CSCGSCCKFDEDDSEP

SEQ ID NO: 1949 - protein, 16 aa, SARS-CoV-2
DPSKPSKRSFIEDLLF

SEQ ID NO: 1950 - protein, 16 aa, SARS-CoV-2
TESNKKFLPFQQFGRD

SEQ ID NO: 1951 - protein, 16 aa, SARS-CoV-2
DLDDFSKQLQQSMSSA

SEQ ID NO: 1952 - protein, 16 aa, SARS-CoV-2
YTMADLVYALRHFDEG

SEQ ID NO: 1953 - protein, 16 aa, SARS-CoV-2
HADQLTPTWRVYSTGS

SEQ ID NO: 1954 - protein, 16 aa, SARS-CoV-2
GRCDIKDLPKEITVAT

SEQ ID NO: 1955 - protein, 16 aa, SARS-CoV-2
LGASQRVAGDSGFAAY

SEQ ID NO: 1956 - protein, 16 aa, SARS-CoV-2
TGVLTESNKKFLPFQQ

SEQ ID NO: 1957 - protein, 16 aa, SARS-CoV-2
SKQRRPQGLPNNTASW

SEQ ID NO: 1958 - protein, 16 aa, SARS-CoV-2
ALLLLDRLNQLESKMS

SEQ ID NO: 1959 - protein, 16 aa, SARS-CoV-2
ASQSIIAYTMSLGAEN

SEQ ID NO: 1960 - protein, 16 aa, SARS-CoV-2
QLPQGTTLPKGFYAEG

SEQ ID NO: 1961 - protein, 16 aa, SARS-CoV-2
FKEELDKYFKNHTSPD

SEQ ID NO: 1962 - protein, 16 aa, SARS-CoV-2
VAGDSGFAAYSRYRIG

SEQ ID NO: 1963 - protein, 16 aa, SARS-CoV-2
SAAEASKKPRQKRTAT

SEQ ID NO: 1964 - protein, 16 aa, SARS-CoV-2
ITREEAIRHVRAWIGF

SEQ ID NO: 1965 - protein, 16 aa, SARS-CoV-2
SVASQSIIAYTMSLGA

SEQ ID NO: 1966 - protein, 16 aa, SARS-CoV-2
VNCTEVPVAIHADQLT

SEQ ID NO: 1967 - protein, 16 aa, SARS-CoV-2
LNTDHSSSSDNIALLV

SEQ ID NO: 1968 - protein, 16 aa, SARS-CoV-2
TTLEETKFLTENLLLY

SEQ ID NO: 1969 - protein, 16 aa, SARS-CoV-2
TTLEETKFLTENLLLY

SEQ ID NO: 1970 - protein, 16 aa, SARS-CoV-2
VAIHADQLTPTWRVYS

SEQ ID NO: 1971 - protein, 16 aa, SARS-CoV-2
ITISSFKWDLTAFGLV

SEQ ID NO: 1972 - protein, 16 aa, SARS-CoV-2
STASALGKLQDVVNQN

SEQ ID NO: 1973 - protein, 16 aa, SARS-CoV-2
NAPRITFGGPSDSTGS

SEQ ID NO: 1974 - protein, 16 aa, SARS-CoV-2
ITFDNLKTLLSLREVR

SEQ ID NO: 1975 - protein, 16 aa, SARS-CoV-2
ITFDNLKTLLSLREVR

SEQ ID NO: 1976 - protein, 14 aa, SARS-CoV-2
DHSSSSDNIALLVQ

SEQ ID NO: 1977 - protein, 16 aa, SARS-CoV-2
QRNAPRITFGGPSDST

SEQ ID NO: 1978 - protein, 16 aa, SARS-CoV-2
YFKNHTSPDVDLGDIS

SEQ ID NO: 1979 - protein, 16 aa, SARS-CoV-2
VLQLPQGTTLPKGFYA

SEQ ID NO: 1980 - protein, 16 aa, SARS-CoV-2
TVEELKKLLEQWNLVI

SEQ ID NO: 1981 - protein, 16 aa, SARS-CoV-2
AADLDDFSKQLQQSMS

SEQ ID NO: 1982 - protein, 16 aa, SARS-CoV-2
KDFGGFNFSQILPDPS

SEQ ID NO: 1983 - protein, 16 aa, SARS-CoV-2
RDPQTLEILDITPCSF

SEQ ID NO: 1984 - protein, 16 aa, SARS-CoV-2
ELDSFKEELDKYFKNH

SEQ ID NO: 1985 - protein, 16 aa, SARS-CoV-2
AALALLLLDRLNQLES

SEQ ID NO: 1986 - protein, 16 aa, SARS-CoV-2
DEDDSEPVLKGVKLHY

SEQ ID NO: 1987 - protein, 16 aa, SARS-CoV-2
RSFIEDLLFNKVTLAD

SEQ ID NO: 1988 - protein, 16 aa, SARS-CoV-2
PFQQFGRDIADTTDAV

SEQ ID NO: 1989 - protein, 16 aa, SARS-CoV-2
LDDFSKQLQQSMSSAD

SEQ ID NO: 1990 - protein, 16 aa, SARS-CoV-2
YTMADLVYALRHFDEG

SEQ ID NO: 1991 - protein, 16 aa, SARS-CoV-2
ADQLTPTWRVYSTGSN

SEQ ID NO: 1992 - protein, 16 aa, SARS-CoV-2
KDLPKEITVATSRTLS

SEQ ID NO: 1993 - protein, 16 aa, SARS-CoV-2
QRVAGDSGFAAYSRYR

SEQ ID NO: 1994 - protein, 16 aa, SARS-CoV-2
TGVLTESNKKFLPFQQ

SEQ ID NO: 1995 - protein, 16 aa, SARS-CoV-2
SKQRRPQGLPNNTASW

SEQ ID NO: 1996 - protein, 16 aa, SARS-CoV-2
LLLLDRLNQLESKMSG

SEQ ID NO: 1997 - protein, 16 aa, SARS-CoV-2
QSIIAYTMSLGAENSV

SEQ ID NO: 1998 - protein, 16 aa, SARS-CoV-2
LPQGTTLPKGFYAEGS

SEQ ID NO: 1999 - protein, 16 aa, SARS-CoV-2
FKEELDKYFKNHTSPD

SEQ ID NO: 2000 - protein, 16 aa, SARS-CoV-2
GDSGFAAYSRYRIGNY

SEQ ID NO: 2001 - protein, 16 aa, SARS-CoV-2
SAAEASKKPRQKRTAT

SEQ ID NO: 2002 - protein, 16 aa, SARS-CoV-2
ITREEAIRHVRAWIGF

SEQ ID NO: 2003 - protein, 16 aa, SARS-CoV-2
SVASQSIIAYTMSLGA

SEQ ID NO: 2004 - protein, 16 aa, SARS-CoV-2
VNCTEVPVAIHADQLT

SEQ ID NO: 2005 - protein, 16 aa, SARS-CoV-2
NTDHSSSSDNIALLVQ

SEQ ID NO: 2006 - protein, 16 aa, SARS-CoV-2
TTLEETKFLTENLLLY

SEQ ID NO: 2007 - protein, 16 aa, SARS-CoV-2
TTLEETKFLTENLLLY

SEQ ID NO: 2008 - protein, 16 aa, SARS-CoV-2
VAIHADQLTPTWRVYS

SEQ ID NO: 2009 - protein, 16 aa, SARS-CoV-2
ITISSFKWDLTAFGLV

SEQ ID NO: 2010 - protein, 16 aa, SARS-CoV-2
STASALGKLQDVVNQN

SEQ ID NO: 2011 - protein, 16 aa, SARS-CoV-2
NAPRITFGGPSDSTGS

SEQ ID NO: 2012 - protein, 16 aa, SARS-CoV-2
ITFDNLKTLLSLREVR

SEQ ID NO: 2013 - protein, 16 aa, SARS-CoV-2
ITFDNLKTLLSLREVR

SEQ ID NO: 2014 - protein, 14 aa, SARS-CoV-2
DHSSSSDNIALLVQ

SEQ ID NO: 2015 - protein, 16 aa, SARS-CoV-2
QRNAPRITFGGPSDST

SEQ ID NO: 2016 - protein, 16 aa, SARS-CoV-2
YFKNHTSPDVDLGDIS

SEQ ID NO: 2017 - protein, 16 aa, SARS-CoV-2
VLQLPQGTTLPKGFYA

SEQ ID NO: 2018 - protein, 8 aa, SARS-CoV-2
TVEELKKL

SEQ ID NO: 2019 - protein, 5 aa, SARS-CoV-2
AADLD

SEQ ID NO: 2020 - protein, 8 aa, SARS-CoV-2
KDFGGFNF

SEQ ID NO: 2021 - protein, 7 aa, SARS-CoV-2
RDPQTLE

SEQ ID NO: 2022 - protein, 13 aa, SARS-CoV-2
ELDSFKEELDKYF

SEQ ID NO: 2023 - protein, 7 aa, SARS-CoV-2
AALALLL

SEQ ID NO: 2024 - protein, 7 aa, SARS-CoV-2
DEDDSEP

SEQ ID NO: 2025 - protein, 9 aa, SARS-CoV-2
RSFIEDLLF

SEQ ID NO: 2026 - protein, 8 aa, SARS-CoV-2
PFQQFGRD

SEQ ID NO: 2027 - protein, 15 aa, SARS-CoV-2
LDDFSKQLQQSMSSA

SEQ ID NO: 2028 - protein, 16 aa, SARS-CoV-2
YTMADLVYALRHFDEG

SEQ ID NO: 2029 - protein, 15 aa, SARS-CoV-2
ADQLTPTWRVYSTGS

SEQ ID NO: 2030 - protein, 11 aa, SARS-CoV-2
KDLPKEITVAT

SEQ ID NO: 2031 - protein, 12 aa, SARS-CoV-2
QRVAGDSGFAAY

SEQ ID NO: 2032 - protein, 16 aa, SARS-CoV-2
TGVLTESNKKFLPFQQ

SEQ ID NO: 2033 - protein, 16 aa, SARS-CoV-2
SKQRRPQGLPNNTASW

SEQ ID NO: 2034 - protein, 15 aa, SARS-CoV-2
LLLLDRLNQLESKMS

SEQ ID NO: 2035 - protein, 14 aa, SARS-CoV-2
QSIIAYTMSLGAEN

SEQ ID NO: 2036 - protein, 15 aa, SARS-CoV-2
LPQGTTLPKGFYAEG

SEQ ID NO: 2037 - protein, 16 aa, SARS-CoV-2
FKEELDKYFKNHTSPD

SEQ ID NO: 2038 - protein, 14 aa, SARS-CoV-2
GDSGFAAYSRYRIG

SEQ ID NO: 2039 - protein, 16 aa, SARS-CoV-2
SAAEASKKPRQKRTAT

SEQ ID NO: 2040 - protein, 16 aa, SARS-CoV-2
ITREEAIRHVRAWIGF

SEQ ID NO: 2041 - protein, 16 aa, SARS-CoV-2
SVASQSIIAYTMSLGA

SEQ ID NO: 2042 - protein, 16 aa, SARS-CoV-2
VNCTEVPVAIHADQLT

SEQ ID NO: 2043 - protein, 15 aa, SARS-CoV-2
NTDHSSSSDNIALLV

SEQ ID NO: 2044 - protein, 16 aa, SARS-CoV-2
TTLEETKFLTENLLLY

SEQ ID NO: 2045 - protein, 16 aa, SARS-CoV-2
TTLEETKFLTENLLLY

SEQ ID NO: 2046 - protein, 16 aa, SARS-CoV-2
VAIHADQLTPTWRVYS

SEQ ID NO: 2047 - protein, 16 aa, SARS-CoV-2
ITISSFKWDLTAFGLV

SEQ ID NO: 2048 - protein, 16 aa, SARS-CoV-2
STASALGKLQDVVNQN

SEQ ID NO: 2049 - protein, 16 aa, SARS-CoV-2
NAPRITFGGPSDSTGS

SEQ ID NO: 2050 - protein, 16 aa, SARS-CoV-2
ITFDNLKTLLSLREVR

SEQ ID NO: 2051 - protein, 16 aa, SARS-CoV-2
ITFDNLKTLLSLREVR

SEQ ID NO: 2052 - protein, 14 aa, SARS-CoV-2
DHSSSSDNIALLVQ

SEQ ID NO: 2053 - protein, 16 aa, SARS-CoV-2
QRNAPRITFGGPSDST

SEQ ID NO: 2054 - protein, 16 aa, SARS-CoV-2
YFKNHTSPDVDLGDIS

SEQ ID NO: 2055 - protein, 16 aa, SARS-CoV-2
VLQLPQGTTLPKGFYA

SEQ ID NO: 2056 - protein, 24 aa, SARS-CoV-2
MADSNGTITVEELKKLLEQWNLVI

SEQ ID NO: 2057 - protein, 27 aa, SARS-CoV-2
QKKQQTVTLLPAADLDDFSKQLQQSMS

SEQ ID NO: 2058 - protein, 24 aa, SARS-CoV-2
QIYKTPPIKDFGGFNFSQILPDPS

SEQ ID NO: 2059 - protein, 25 aa, SARS-CoV-2
DIADTTDAVRDPQTLEILDITPCSF

SEQ ID NO: 2060 - protein, 19 aa, SARS-CoV-2
LQPELDSFKEELDKYFKNH

SEQ ID NO: 2061 - protein, 25 aa, SARS-CoV-2
ARMAGNGGDAALALLLLDRLNQLES

SEQ ID NO: 2062 - protein, 25 aa, SARS-CoV-2
CSCGSCCKFDEDDSEPVLKGVKLHY

SEQ ID NO: 2063 - protein, 23 aa, SARS-CoV-2
DPSKPSKRSFIEDLLFNKVTLAD

SEQ ID NO: 2064 - protein, 24 aa, SARS-CoV-2
TESNKKFLPFQQFGRDIADTTDAV

SEQ ID NO: 2065 - protein, 17 aa, SARS-CoV-2
DLDDFSKQLQQSMSSAD

SEQ ID NO: 2066 - protein, 16 aa, SARS-CoV-2
YTMADLVYALRHFDEG

SEQ ID NO: 2067 - protein, 17 aa, SARS-CoV-2
HADQLTPTWRVYSTGSN

SEQ ID NO: 2068 - protein, 21 aa, SARS-CoV-2
GRCDIKDLPKEITVATSRTLS

SEQ ID NO: 2069 - protein, 20 aa, SARS-CoV-2
LGASQRVAGDSGFAAYSRYR

SEQ ID NO: 2070 - protein, 16 aa, SARS-CoV-2
TGVLTESNKKFLPFQQ

SEQ ID NO: 2071 - protein, 16 aa, SARS-CoV-2
SKQRRPQGLPNNTASW

SEQ ID NO: 2072 - protein, 17 aa, SARS-CoV-2
ALLLLDRLNQLESKMSG

SEQ ID NO: 2073 - protein, 18 aa, SARS-CoV-2
ASQSIIAYTMSLGAENSV

SEQ ID NO: 2074 - protein, 17 aa, SARS-CoV-2
QLPQGTTLPKGFYAEGS

SEQ ID NO: 2075 - protein, 16 aa, SARS-CoV-2
FKEELDKYFKNHTSPD

SEQ ID NO: 2076 - protein, 18 aa, SARS-CoV-2
VAGDSGFAAYSRYRIGNY

SEQ ID NO: 2077 - protein, 16 aa, SARS-CoV-2
SAAEASKKPRQKRTAT

SEQ ID NO: 2078 - protein, 16 aa, SARS-CoV-2
ITREEAIRHVRAWIGF

SEQ ID NO: 2079 - protein, 16 aa, SARS-CoV-2
SVASQSIIAYTMSLGA

SEQ ID NO: 2080 - protein, 16 aa, SARS-CoV-2
VNCTEVPVAIHADQLT

SEQ ID NO: 2081 - protein, 17 aa, SARS-CoV-2
LNTDHSSSSDNIALLVQ

SEQ ID NO: 2082 - protein, 16 aa, SARS-CoV-2
TTLEETKFLTENLLLY

SEQ ID NO: 2083 - protein, 16 aa, SARS-CoV-2
TTLEETKFLTENLLLY

SEQ ID NO: 2084 - protein, 16 aa, SARS-CoV-2
VAIHADQLTPTWRVYS

SEQ ID NO: 2085 - protein, 16 aa, SARS-CoV-2
ITISSFKWDLTAFGLV

SEQ ID NO: 2086 - protein, 16 aa, SARS-CoV-2
STASALGKLQDVVNQN

SEQ ID NO: 2087 - protein, 16 aa, SARS-CoV-2
NAPRITFGGPSDSTGS

SEQ ID NO: 2088 - protein, 16 aa, SARS-CoV-2
ITFDNLKTLLSLREVR

SEQ ID NO: 2089 - protein, 16 aa, SARS-CoV-2
ITFDNLKTLLSLREVR

SEQ ID NO: 2090 - protein, 14 aa, SARS-CoV-2
DHSSSSDNIALLVQ

SEQ ID NO: 2091 - protein, 16 aa, SARS-CoV-2
QRNAPRITFGGPSDST

SEQ ID NO: 2092 - protein, 16 aa, SARS-CoV-2
YFKNHTSPDVDLGDIS

SEQ ID NO: 2093 - protein, 16 aa, SARS-CoV-2
VLQLPQGTTLPKGFYA

SEQ ID NO: 2094 - protein, 16 aa, SARS-CoV-2
MADSNGTITVEELKKL

SEQ ID NO: 2095 - protein, 16 aa, SARS-CoV-2
TITVEELKKLLEQWNL

SEQ ID NO: 2096 - protein, 16 aa, SARS-CoV-2
QKKQQTVTLLPAADLD

SEQ ID NO: 2097 - protein, 16 aa, SARS-CoV-2
VTLLPAADLDDFSKQL

SEQ ID NO: 2098 - protein, 16 aa, SARS-CoV-2
QIYKTPPIKDFGGFNF

SEQ ID NO: 2099 - protein, 16 aa, SARS-CoV-2
PIKDFGGFNFSQILPD

SEQ ID NO: 2100 - protein, 16 aa, SARS-CoV-2
DIADTTDAVRDPQTLE

SEQ ID NO: 2101 - protein, 16 aa, SARS-CoV-2
DAVRDPQTLEILDITP

SEQ ID NO: 2102 - protein, 16 aa, SARS-CoV-2
LQPELDSFKEELDKYF

SEQ ID NO: 2103 - protein, 16 aa, SARS-CoV-2
ARMAGNGGDAALALLL

SEQ ID NO: 2104 - protein, 16 aa, SARS-CoV-2
GGDAALALLLLDRLNQ

SEQ ID NO: 2105 - protein, 16 aa, SARS-CoV-2
CSCGSCCKFDEDDSEP

SEQ ID NO: 2106 - protein, 16 aa, SARS-CoV-2
CKFDEDDSEPVLKGVK

SEQ ID NO: 2107 - protein, 16 aa, SARS-CoV-2
DPSKPSKRSFIEDLLF

SEQ ID NO: 2108 - protein, 16 aa, SARS-CoV-2
KRSFIEDLLFNKVTLA

SEQ ID NO: 2109 - protein, 16 aa, SARS-CoV-2
TESNKKFLPFQQFGRD

SEQ ID NO: 2110 - protein, 16 aa, SARS-CoV-2
FLPFQQFGRDIADTTD

SEQ ID NO: 2111 - protein, 16 aa, SARS-CoV-2
DLDDFSKQLQQSMSSA

SEQ ID NO: 2112 - protein, 16 aa, SARS-CoV-2
YTMADLVYALRHFDEG

SEQ ID NO: 2113 - protein, 16 aa, SARS-CoV-2
HADQLTPTWRVYSTGS

SEQ ID NO: 2114 - protein, 16 aa, SARS-CoV-2
GRCDIKDLPKEITVAT

SEQ ID NO: 2115 - protein, 16 aa, SARS-CoV-2
LGASQRVAGDSGFAAY

SEQ ID NO: 2116 - protein, 16 aa, SARS-CoV-2
TGVLTESNKKFLPFQQ

SEQ ID NO: 2117 - protein, 16 aa, SARS-CoV-2
SKQRRPQGLPNNTASW

SEQ ID NO: 2118 - protein, 16 aa, SARS-CoV-2
ALLLLDRLNQLESKMS

SEQ ID NO: 2119 - protein, 16 aa, SARS-CoV-2
ASQSIIAYTMSLGAEN

SEQ ID NO: 2120 - protein, 16 aa, SARS-CoV-2
QLPQGTTLPKGFYAEG

SEQ ID NO: 2121 - protein, 16 aa, SARS-CoV-2
FKEELDKYFKNHTSPD

SEQ ID NO: 2122 - protein, 16 aa, SARS-CoV-2
VAGDSGFAAYSRYRIG

SEQ ID NO: 2123 - protein, 16 aa, SARS-CoV-2
SAAEASKKPRQKRTAT

SEQ ID NO: 2124 - protein, 16 aa, SARS-CoV-2
ITREEAIRHVRAWIGF

SEQ ID NO: 2125 - protein, 16 aa, SARS-CoV-2
SVASQSIIAYTMSLGA

SEQ ID NO: 2126 - protein, 16 aa, SARS-CoV-2
VNCTEVPVAIHADQLT

SEQ ID NO: 2127 - protein, 16 aa, SARS-CoV-2
LNTDHSSSSDNIALLV

SEQ ID NO: 2128 - protein, 16 aa, SARS-CoV-2
TTLEETKFLTENLLLY

SEQ ID NO: 2129 - protein, 16 aa, SARS-CoV-2
TTLEETKFLTENLLLY

SEQ ID NO: 2130 - protein, 16 aa, SARS-CoV-2
VAIHADQLTPTWRVYS

SEQ ID NO: 2131 - protein, 16 aa, SARS-CoV-2
ITISSFKWDLTAFGLV

SEQ ID NO: 2132 - protein, 16 aa, SARS-CoV-2
STASALGKLQDVVNQN

SEQ ID NO: 2133 - protein, 16 aa, SARS-CoV-2
NAPRITFGGPSDSTGS

SEQ ID NO: 2134 - protein, 16 aa, SARS-CoV-2
ITFDNLKTLLSLREVR

SEQ ID NO: 2135 - protein, 16 aa, SARS-CoV-2
ITFDNLKTLLSLREVR

SEQ ID NO: 2136 - protein, 14 aa, SARS-CoV-2
DHSSSSDNIALLVQ

SEQ ID NO: 2137 - protein, 16 aa, SARS-CoV-2
QRNAPRITFGGPSDST

SEQ ID NO: 2138 - protein, 16 aa, SARS-CoV-2
YFKNHTSPDVDLGDIS

SEQ ID NO: 2139 - protein, 16 aa, SARS-CoV-2
VLQLPQGTTLPKGFYA

SEQ ID NO: 2140 - protein, 16 aa, SARS-CoV-2
ADSNGTITVEELKKLL

SEQ ID NO: 2141 - protein, 16 aa, SARS-CoV-2
ITVEELKKLLEQWNLV

SEQ ID NO: 2142 - protein, 16 aa, SARS-CoV-2
KKQQTVTLLPAADLDD

SEQ ID NO: 2143 - protein, 16 aa, SARS-CoV-2
TLLPAADLDDFSKQLQ

SEQ ID NO: 2144 - protein, 16 aa, SARS-CoV-2
IYKTPPIKDFGGFNFS

SEQ ID NO: 2145 - protein, 16 aa, SARS-CoV-2
IKDFGGFNFSQILPDP

SEQ ID NO: 2146 - protein, 16 aa, SARS-CoV-2
IADTTDAVRDPQTLEI

SEQ ID NO: 2147 - protein, 16 aa, SARS-CoV-2
AVRDPQTLEILDITPC

SEQ ID NO: 2148 - protein, 16 aa, SARS-CoV-2
QPELDSFKEELDKYFK

SEQ ID NO: 2149 - protein, 16 aa, SARS-CoV-2
RMAGNGGDAALALLLL

SEQ ID NO: 2150 - protein, 16 aa, SARS-CoV-2
GDAALALLLLDRLNQL

SEQ ID NO: 2151 - protein, 16 aa, SARS-CoV-2
SCGSCCKFDEDDSEPV

SEQ ID NO: 2152 - protein, 16 aa, SARS-CoV-2
KFDEDDSEPVLKGVKL

SEQ ID NO: 2153 - protein, 16 aa, SARS-CoV-2
PSKPSKRSFIEDLLFN

SEQ ID NO: 2154 - protein, 16 aa, SARS-CoV-2
RSFIEDLLFNKVTLAD

SEQ ID NO: 2155 - protein, 16 aa, SARS-CoV-2
ESNKKFLPFQQFGRDI

SEQ ID NO: 2156 - protein, 16 aa, SARS-CoV-2
LPFQQFGRDIADTTDA

SEQ ID NO: 2157 - protein, 16 aa, SARS-CoV-2
LDDFSKQLQQSMSSAD

SEQ ID NO: 2158 - protein, 16 aa, SARS-CoV-2
ADQLTPTWRVYSTGSN

SEQ ID NO: 2159 - protein, 16 aa, SARS-CoV-2
RCDIKDLPKEITVATS

SEQ ID NO: 2160 - protein, 16 aa, SARS-CoV-2
GASQRVAGDSGFAAYS

SEQ ID NO: 2161 - protein, 16 aa, SARS-CoV-2
LLLLDRLNQLESKMSG

SEQ ID NO: 2162 - protein, 16 aa, SARS-CoV-2
SQSIIAYTMSLGAENS

SEQ ID NO: 2163 - protein, 16 aa, SARS-CoV-2
LPQGTTLPKGFYAEGS

SEQ ID NO: 2164 - protein, 16 aa, SARS-CoV-2
AGDSGFAAYSRYRIGN

SEQ ID NO: 2165 - protein, 16 aa, SARS-CoV-2
NTDHSSSSDNIALLVQ

SEQ ID NO: 2166 - protein, 16 aa, SARS-CoV-2
DSNGTITVEELKKLLE

SEQ ID NO: 2167 - protein, 16 aa, SARS-CoV-2
TVEELKKLLEQWNLVI

SEQ ID NO: 2168 - protein, 16 aa, SARS-CoV-2
KQQTVTLLPAADLDDF

SEQ ID NO: 2169 - protein, 16 aa, SARS-CoV-2
LLPAADLDDFSKQLQQ

SEQ ID NO: 2170 - protein, 16 aa, SARS-CoV-2
YKTPPIKDFGGFNFSQ

SEQ ID NO: 2171 - protein, 16 aa, SARS-CoV-2
KDFGGFNFSQILPDPS

SEQ ID NO: 2172 - protein, 16 aa, SARS-CoV-2
ADTTDAVRDPQTLEIL

SEQ ID NO: 2173 - protein, 16 aa, SARS-CoV-2
VRDPQTLEILDITPCS

SEQ ID NO: 2174 - protein, 16 aa, SARS-CoV-2
PELDSFKEELDKYFKN

SEQ ID NO: 2175 - protein, 16 aa, SARS-CoV-2
MAGNGGDAALALLLLD

SEQ ID NO: 2176 - protein, 16 aa, SARS-CoV-2
DAALALLLLDRLNQLE

SEQ ID NO: 2177 - protein, 16 aa, SARS-CoV-2
CGSCCKFDEDDSEPVL

SEQ ID NO: 2178 - protein, 16 aa, SARS-CoV-2
FDEDDSEPVLKGVKLH

SEQ ID NO: 2179 - protein, 16 aa, SARS-CoV-2
SKPSKRSFIEDLLFNK

SEQ ID NO: 2180 - protein, 16 aa, SARS-CoV-2
SNKKFLPFQQFGRDIA

SEQ ID NO: 2181 - protein, 16 aa, SARS-CoV-2
PFQQFGRDIADTTDAV

SEQ ID NO: 2182 - protein, 16 aa, SARS-CoV-2
CDIKDLPKEITVATSR

SEQ ID NO: 2183 - protein, 16 aa, SARS-CoV-2
ASQRVAGDSGFAAYSR

SEQ ID NO: 2184 - protein, 16 aa, SARS-CoV-2
QSIIAYTMSLGAENSV

SEQ ID NO: 2185 - protein, 16 aa, SARS-CoV-2
GDSGFAAYSRYRIGNY

SEQ ID NO: 2186 - protein, 16 aa, SARS-CoV-2
SNGTITVEELKKLLEQ

SEQ ID NO: 2187 - protein, 16 aa, SARS-CoV-2
QQTVTLLPAADLDDFS

SEQ ID NO: 2188 - protein, 16 aa, SARS-CoV-2
LPAADLDDFSKQLQQS

SEQ ID NO: 2189 - protein, 16 aa, SARS-CoV-2
KTPPIKDFGGFNFSQI

SEQ ID NO: 2190 - protein, 16 aa, SARS-CoV-2
DTTDAVRDPQTLEILD

SEQ ID NO: 2191 - protein, 16 aa, SARS-CoV-2
RDPQTLEILDITPCSF

SEQ ID NO: 2192 - protein, 16 aa, SARS-CoV-2
ELDSFKEELDKYFKNH

SEQ ID NO: 2193 - protein, 16 aa, SARS-CoV-2
AGNGGDAALALLLLDR

SEQ ID NO: 2194 - protein, 16 aa, SARS-CoV-2
AALALLLLDRLNQLES

SEQ ID NO: 2195 - protein, 16 aa, SARS-CoV-2
GSCCKFDEDDSEPVLK

SEQ ID NO: 2196 - protein, 16 aa, SARS-CoV-2
DEDDSEPVLKGVKLHY

SEQ ID NO: 2197 - protein, 16 aa, SARS-CoV-2
KPSKRSFIEDLLFNKV

SEQ ID NO: 2198 - protein, 16 aa, SARS-CoV-2
NKKFLPFQQFGRDIAD

SEQ ID NO: 2199 - protein, 16 aa, SARS-CoV-2
DIKDLPKEITVATSRT

SEQ ID NO: 2200 - protein, 16 aa, SARS-CoV-2
SQRVAGDSGFAAYSRY

SEQ ID NO: 2201 - protein, 16 aa, SARS-CoV-2
NGTITVEELKKLLEQW

SEQ ID NO: 2202 - protein, 16 aa, SARS-CoV-2
QTVTLLPAADLDDFSK

SEQ ID NO: 2203 - protein, 16 aa, SARS-CoV-2
PAADLDDFSKQLQQSM

SEQ ID NO: 2204 - protein, 16 aa, SARS-CoV-2
TPPIKDFGGFNFSQIL

SEQ ID NO: 2205 - protein, 16 aa, SARS-CoV-2
TTDAVRDPQTLEILDI

SEQ ID NO: 2206 - protein, 16 aa, SARS-CoV-2
GNGGDAALALLLLDRL

SEQ ID NO: 2207 - protein, 16 aa, SARS-CoV-2
SCCKFDEDDSEPVLKG

SEQ ID NO: 2208 - protein, 16 aa, SARS-CoV-2
PSKRSFIEDLLFNKVT

SEQ ID NO: 2209 - protein, 16 aa, SARS-CoV-2
KKFLPFQQFGRDIADT

SEQ ID NO: 2210 - protein, 16 aa, SARS-CoV-2
IKDLPKEITVATSRTL

SEQ ID NO: 2211 - protein, 16 aa, SARS-CoV-2
QRVAGDSGFAAYSRYR

SEQ ID NO: 2212 - protein, 16 aa, SARS-CoV-2
GTITVEELKKLLEQWN

SEQ ID NO: 2213 - protein, 16 aa, SARS-CoV-2
TVTLLPAADLDDFSKQ

SEQ ID NO: 2214 - protein, 16 aa, SARS-CoV-2
AADLDDFSKQLQQSMS

SEQ ID NO: 2215 - protein, 16 aa, SARS-CoV-2
PPIKDFGGFNFSQILP

SEQ ID NO: 2216 - protein, 16 aa, SARS-CoV-2
TDAVRDPQTLEILDIT

SEQ ID NO: 2217 - protein, 16 aa, SARS-CoV-2
NGGDAALALLLLDRLN

SEQ ID NO: 2218 - protein, 16 aa, SARS-CoV-2
CCKFDEDDSEPVLKGV

SEQ ID NO: 2219 - protein, 16 aa, SARS-CoV-2
SKRSFIEDLLFNKVTL

SEQ ID NO: 2220 - protein, 16 aa, SARS-CoV-2
KFLPFQQFGRDIADTT

SEQ ID NO: 2221 - protein, 16 aa, SARS-CoV-2
KDLPKEITVATSRTLS

SEQ ID NO: 2222 - protein, 16 aa, SARS-CoV-2
QNQRNAPRITFGGPSD

SEQ ID NO: 2223 - protein, 16 aa, SARS-CoV-2
RITFGGPSDSTGSNQN

SEQ ID NO: 2224 - protein, 16 aa, SARS-CoV-2
QNGERSGARSKQRRPQ

SEQ ID NO: 2225 - protein, 16 aa, SARS-CoV-2
IRGGDGKMKDLSPRWY

SEQ ID NO: 2226 - protein, 16 aa, SARS-CoV-2
GGDGKMKDLSPRWYFY

SEQ ID NO: 2227 - protein, 16 aa, SARS-CoV-2
PEAGLPYGANKDGIIW

SEQ ID NO: 2228 - protein, 16 aa, SARS-CoV-2
PYGANKDGIIWVATEG

SEQ ID NO: 2229 - protein, 16 aa, SARS-CoV-2
GANKDGIIWVATEGAL

SEQ ID NO: 2230 - protein, 16 aa, SARS-CoV-2
NKDGIIWVATEGALNT

SEQ ID NO: 2231 - protein, 16 aa, SARS-CoV-2
NNAAIVLQLPQGTTLP

SEQ ID NO: 2232 - protein, 16 aa, SARS-CoV-2
ARMAGNGGDAALALLL

SEQ ID NO: 2233 - protein, 16 aa, SARS-CoV-2
LNQLESKMSGKGQQQQ

SEQ ID NO: 2234 - protein, 16 aa, SARS-CoV-2
LESKMSGKGQQQQGQT

SEQ ID NO: 2235 - protein, 16 aa, SARS-CoV-2
QGQTVTKKSAAEASKK

SEQ ID NO: 2236 - protein, 16 aa, SARS-CoV-2
KSAAEASKKPRQKRTA

SEQ ID NO: 2237 - protein, 16 aa, SARS-CoV-2
AIKLDDKDPNFKDQVI

SEQ ID NO: 2238 - protein, 16 aa, SARS-CoV-2
KLDDKDPNFKDQVILL

SEQ ID NO: 2239 - protein, 16 aa, SARS-CoV-2
HIDAYKTFPPTEPKKD

SEQ ID NO: 2240 - protein, 16 aa, SARS-CoV-2
ADETQALPQRQKKQQT

SEQ ID NO: 2241 - protein, 16 aa, SARS-CoV-2
QRQKKQQTVTLLPAAD

SEQ ID NO: 2242 - protein, 16 aa, SARS-CoV-2
GPQARAPRITFGGPSD

SEQ ID NO: 2243 - protein, 16 aa, SARS-CoV-2
GDRSGARPKQRRPQGL

SEQ ID NO: 2244 - protein, 16 aa, SARS-CoV-2
VRGGDGKMKDLSPRWY

SEQ ID NO: 2245 - protein, 16 aa, SARS-CoV-2
GGDGKMKDLSPRWYFY

SEQ ID NO: 2246 - protein, 16 aa, SARS-CoV-2
EGIIWVATEGALNTPK

SEQ ID NO: 2247 - protein, 16 aa, SARS-CoV-2
NAAIVLQLPQGTALPK

SEQ ID NO: 2248 - protein, 16 aa, SARS-CoV-2
QGTALPKGFYAEGSRG

SEQ ID NO: 2249 - protein, 16 aa, SARS-CoV-2
ARIAGNGGDAALALLL

SEQ ID NO: 2250 - protein, 16 aa, SARS-CoV-2
LNALESKMSGKGSQQQ

SEQ ID NO: 2251 - protein, 16 aa, SARS-CoV-2
QSQTVTKKSAAEASKK

SEQ ID NO: 2252 - protein, 16 aa, SARS-CoV-2
KSAAEASKKPRQKRTA

SEQ ID NO: 2253 - protein, 16 aa, SARS-CoV-2
KLDDKDPSFKDNVILL

SEQ ID NO: 2254 - protein, 16 aa, SARS-CoV-2
DDKDPSFKDNVILLNK

SEQ ID NO: 2255 - protein, 16 aa, SARS-CoV-2
HIDAYKTFPPTEPKKD

SEQ ID NO: 2256 - protein, 16 aa, SARS-CoV-2
DESQPLPQRQKKQQTV

SEQ ID NO: 2257 - protein, 16 aa, SARS-CoV-2
QPLPQRQKKQQTVTLL

SEQ ID NO: 2258 - protein, 16 aa, SARS-CoV-2
QRQKKQQTVTLLPAAD

SEQ ID NO: 2259 - protein, 16 aa, SARS-CoV-2
NQRSAPRITFGGPTDS

SEQ ID NO: 2260 - protein, 16 aa, SARS-CoV-2
NGGRNGARPKQRRPQG

SEQ ID NO: 2261 - protein, 16 aa, SARS-CoV-2
VRGGDGKMKELSPRWY

SEQ ID NO: 2262 - protein, 16 aa, SARS-CoV-2
GGDGKMKELSPRWYFY

SEQ ID NO: 2263 - protein, 16 aa, SARS-CoV-2
EGIVWVATEGALNTPK

SEQ ID NO: 2264 - protein, 16 aa, SARS-CoV-2
NNAATVLQLPQGTTLP

SEQ ID NO: 2265 - protein, 16 aa, SARS-CoV-2
SQASSRSSSRSRGNSR

SEQ ID NO: 2266 - protein, 16 aa, SARS-CoV-2
GETALALLLLDRLNQL

SEQ ID NO: 2267 - protein, 16 aa, SARS-CoV-2
LNQLESKVSGKGQQQQ

SEQ ID NO: 2268 - protein, 16 aa, SARS-CoV-2
SKVSGKGQQQQGQTVT

SEQ ID NO: 2269 - protein, 16 aa, SARS-CoV-2
QGQTVTKKSAAEASKK

SEQ ID NO: 2270 - protein, 16 aa, SARS-CoV-2
KSAAEASKKPRQKRTA

SEQ ID NO: 2271 - protein, 16 aa, SARS-CoV-2
KLDDKDPQFKDNVILL

SEQ ID NO: 2272 - protein, 16 aa, SARS-CoV-2
DDKDPQFKDNVILLNK

SEQ ID NO: 2273 - protein, 16 aa, SARS-CoV-2
HIDAYKTFPPTEPKKD

SEQ ID NO: 2274 - protein, 16 aa, SARS-CoV-2
TDEAQPLPQRQKKQPT

SEQ ID NO: 2275 - protein, 16 aa, SARS-CoV-2
KKQPTVTLLPAADMDD

SEQ ID NO: 2276 - protein, 16 aa, SARS-CoV-2
DMDDFSRQLQNSMSGA

SEQ ID NO: 2277 - protein, 16 aa, SARS-CoV-2
NQRSAPRITFGGPTDS

SEQ ID NO: 2278 - protein, 16 aa, SARS-CoV-2
NGGRNGARPKQRRPQG

SEQ ID NO: 2279 - protein, 16 aa, SARS-CoV-2
VRGGDGKMKELSPRWY

SEQ ID NO: 2280 - protein, 16 aa, SARS-CoV-2
GGDGKMKELSPRWYFY

SEQ ID NO: 2281 - protein, 16 aa, SARS-CoV-2
EGIVWVATEGALNTPK

SEQ ID NO: 2282 - protein, 16 aa, SARS-CoV-2
NNAATVLQLPQGTTLP

SEQ ID NO: 2283 - protein, 16 aa, SARS-CoV-2
SQASSRSSSRSRGNSR

SEQ ID NO: 2284 - protein, 16 aa, SARS-CoV-2
GETALALLLLDRLNQL

SEQ ID NO: 2285 - protein, 16 aa, SARS-CoV-2
LNQLESKVSGKGQQQQ

SEQ ID NO: 2286 - protein, 16 aa, SARS-CoV-2
SKVSGKGQQQQGQTVT

SEQ ID NO: 2287 - protein, 16 aa, SARS-CoV-2
QGQTVTKKSAAEASKK

SEQ ID NO: 2288 - protein, 16 aa, SARS-CoV-2
KSAAEASKKPRQKRTA

SEQ ID NO: 2289 - protein, 16 aa, SARS-CoV-2
KLDDKDPQFKDNVILL

SEQ ID NO: 2290 - protein, 16 aa, SARS-CoV-2
DDKDPQFKDNVILLNK

SEQ ID NO: 2291 - protein, 16 aa, SARS-CoV-2
HIDAYKTFPPTEPKKD

SEQ ID NO: 2292 - protein, 16 aa, SARS-CoV-2
TDEAQPLPQRQKKQPT

SEQ ID NO: 2293 - protein, 16 aa, SARS-CoV-2
KKQPTVTLLPAADMDD

SEQ ID NO: 2294 - protein, 16 aa, SARS-CoV-2
DMDDFSRQLQNSMSGA

SEQ ID NO: 2295 - protein, 16 aa, SARS-CoV-2
RAVKDGIVWVHEDGAT

SEQ ID NO: 2296 - protein, 16 aa, SARS-CoV-2
SRASSLSRNSSRSSSQ

SEQ ID NO: 2297 - protein, 16 aa, SARS-CoV-2
SPASSQTSAKSLARSQ

SEQ ID NO: 2298 - protein, 16 aa, SARS-CoV-2
APRITFGGPSDSTGSN

SEQ ID NO: 2299 - protein, 16 aa, SARS-CoV-2
ITFGGPSDSTGSNQNG

SEQ ID NO: 2300 - protein, 16 aa, SARS-CoV-2
RRPQGLPNNTASWFTA

SEQ ID NO: 2301 - protein, 16 aa, SARS-CoV-2
IRGGDGKMKDLSPRWY

SEQ ID NO: 2302 - protein, 16 aa, SARS-CoV-2
GDGKMKDLSPRWYFYY

SEQ ID NO: 2303 - protein, 16 aa, SARS-CoV-2
GLPYGANKDGIIWVAT

SEQ ID NO: 2304 - protein, 16 aa, SARS-CoV-2
PYGANKDGIIWVATEG

SEQ ID NO: 2305 - protein, 16 aa, SARS-CoV-2
GANKDGIIWVATEGAL

SEQ ID NO: 2306 - protein, 16 aa, SARS-CoV-2
KDGIIWVATEGALNTP

SEQ ID NO: 2307 - protein, 16 aa, SARS-CoV-2
QGTTLPKGFYAEGSRG

SEQ ID NO: 2308 - protein, 16 aa, SARS-CoV-2
LLDRLNQLESKMSGKG

SEQ ID NO: 2309 - protein, 16 aa, SARS-CoV-2
NQLESKMSGKGQQQQG

SEQ ID NO: 2310 - protein, 16 aa, SARS-CoV-2
SGKGQQQQGQTVTKKS

SEQ ID NO: 2311 - protein, 16 aa, SARS-CoV-2
TVTKKSAAEASKKPRQ

SEQ ID NO: 2312 - protein, 16 aa, SARS-CoV-2
AAEASKKPRQKRTATK

SEQ ID NO: 2313 - protein, 16 aa, SARS-CoV-2
AIKLDDKDPNFKDQVI

SEQ ID NO: 2314 - protein, 16 aa, SARS-CoV-2
DKDPNFKDQVILLNKH

SEQ ID NO: 2315 - protein, 16 aa, SARS-CoV-2
HIDAYKTFPPTEPKKD

SEQ ID NO: 2316 - protein, 16 aa, SARS-CoV-2
LPQRQKKQQTVTLLPA

SEQ ID NO: 2317 - protein, 16 aa, SARS-CoV-2
DDFSKQLQQSMSSADS

SEQ ID NO: 2318 - protein, 16 aa, SARS-CoV-2
RITFGGPSDSTDNNQN

SEQ ID NO: 2319 - protein, 16 aa, SARS-CoV-2
RRPQGLPNNTASWFTA

SEQ ID NO: 2320 - protein, 16 aa, SARS-CoV-2
VRGGDGKMKDLSPRWY

SEQ ID NO: 2321 - protein, 16 aa, SARS-CoV-2
GDGKMKDLSPRWYFYY

SEQ ID NO: 2322 - protein, 16 aa, SARS-CoV-2
EGIIWVATEGALNTPK

SEQ ID NO: 2323 - protein, 16 aa, SARS-CoV-2
LPQGTALPKGFYAEGS

SEQ ID NO: 2324 - protein, 16 aa, SARS-CoV-2
QGTALPKGFYAEGSRG

SEQ ID NO: 2325 - protein, 16 aa, SARS-CoV-2
LLDRLNALESKMSGKG

SEQ ID NO: 2326 - protein, 16 aa, SARS-CoV-2
KMSGKGSQQQSQTVTK

SEQ ID NO: 2327 - protein, 16 aa, SARS-CoV-2
TVTKKSAAEASKKPRQ

SEQ ID NO: 2328 - protein, 16 aa, SARS-CoV-2
AAEASKKPRQKRTATK

SEQ ID NO: 2329 - protein, 16 aa, SARS-CoV-2
KLDDKDPSFKDNVILL

SEQ ID NO: 2330 - protein, 16 aa, SARS-CoV-2
DKDPSFKDNVILLNKH

SEQ ID NO: 2331 - protein, 16 aa, SARS-CoV-2
HIDAYKTFPPTEPKKD

SEQ ID NO: 2332 - protein, 16 aa, SARS-CoV-2
ESQPLPQRQKKQQTVT

SEQ ID NO: 2333 - protein, 16 aa, SARS-CoV-2
LPQRQKKQQTVTLLPA

SEQ ID NO: 2334 - protein, 16 aa, SARS-CoV-2
DDFSKQLQQSMSSADS

SEQ ID NO: 2335 - protein, 16 aa, SARS-CoV-2
APRITFGGPTDSTDNN

SEQ ID NO: 2336 - protein, 16 aa, SARS-CoV-2
RRPQGLPNNTASWFTA

SEQ ID NO: 2337 - protein, 16 aa, SARS-CoV-2
VRGGDGKMKELSPRWY

SEQ ID NO: 2338 - protein, 16 aa, SARS-CoV-2
GGDGKMKELSPRWYFY

SEQ ID NO: 2339 - protein, 16 aa, SARS-CoV-2
GIVWVATEGALNTPKD

SEQ ID NO: 2340 - protein, 16 aa, SARS-CoV-2
QGTTLPKGFYAEGSRG

SEQ ID NO: 2341 - protein, 16 aa, SARS-CoV-2
SQASSRSSSRSRGNSR

SEQ ID NO: 2342 - protein, 16 aa, SARS-CoV-2
LLDRLNQLESKVSGKG

SEQ ID NO: 2343 - protein, 16 aa, SARS-CoV-2
LNQLESKVSGKGQQQQ

SEQ ID NO: 2344 - protein, 16 aa, SARS-CoV-2
SGKGQQQQGQTVTKKS

SEQ ID NO: 2345 - protein, 16 aa, SARS-CoV-2
TVTKKSAAEASKKPRQ

SEQ ID NO: 2346 - protein, 16 aa, SARS-CoV-2
AAEASKKPRQKRTATK

SEQ ID NO: 2347 - protein, 16 aa, SARS-CoV-2
KLDDKDPQFKDNVILL

SEQ ID NO: 2348 - protein, 16 aa, SARS-CoV-2
DDKDPQFKDNVILLNK

SEQ ID NO: 2349 - protein, 16 aa, SARS-CoV-2
HIDAYKTFPPTEPKKD

SEQ ID NO: 2350 - protein, 16 aa, SARS-CoV-2
TDEAQPLPQRQKKQPT

SEQ ID NO: 2351 - protein, 16 aa, SARS-CoV-2
PAADMDDFSRQLQNSM

SEQ ID NO: 2352 - protein, 16 aa, SARS-CoV-2
MDDFSRQLQNSMSGAS

SEQ ID NO: 2353 - protein, 16 aa, SARS-CoV-2
RITFGGPTDSIDNNQN

SEQ ID NO: 2354 - protein, 16 aa, SARS-CoV-2
RRPQGLPNNTASWFTA

SEQ ID NO: 2355 - protein, 16 aa, SARS-CoV-2
VRGGDGKMKELSPRWY

SEQ ID NO: 2356 - protein, 16 aa, SARS-CoV-2
GGDGKMKELSPRWYFY

SEQ ID NO: 2357 - protein, 16 aa, SARS-CoV-2
GIVWVATEGALNTPKD

SEQ ID NO: 2358 - protein, 16 aa, SARS-CoV-2
QGTTLPKGFYAEGSRG

SEQ ID NO: 2359 - protein, 16 aa, SARS-CoV-2
SQASSRSSSRSRGNSR

SEQ ID NO: 2360 - protein, 16 aa, SARS-CoV-2
LLDRLNQLESKVSGKG

SEQ ID NO: 2361 - protein, 16 aa, SARS-CoV-2
LNQLESKVSGKGQQQQ

SEQ ID NO: 2362 - protein, 16 aa, SARS-CoV-2
SGKGQQQQGQTVTKKS

SEQ ID NO: 2363 - protein, 16 aa, SARS-CoV-2
TVTKKSAAEASKKPRQ

SEQ ID NO: 2364 - protein, 16 aa, SARS-CoV-2
AAEASKKPRQKRTATK

SEQ ID NO: 2365 - protein, 16 aa, SARS-CoV-2
KLDDKDPQFKDNVILL

SEQ ID NO: 2366 - protein, 16 aa, SARS-CoV-2
DDKDPQFKDNVILLNK

SEQ ID NO: 2367 - protein, 16 aa, SARS-CoV-2
HIDAYKTFPPTEPKKD

SEQ ID NO: 2368 - protein, 16 aa, SARS-CoV-2
TDEAQPLPQRQKKQPT

SEQ ID NO: 2369 - protein, 16 aa, SARS-CoV-2
PAADMDDFSRQLQNSM

SEQ ID NO: 2370 - protein, 16 aa, SARS-CoV-2
MDDFSRQLQNSMSGAS

SEQ ID NO: 2371 - protein, 16 aa, SARS-CoV-2
AVKDGIVWVHEDGATD

SEQ ID NO: 2372 - protein, 16 aa, SARS-CoV-2
SRASSLSRNSSRSSSQ

SEQ ID NO: 2373 - protein, 16 aa, SARS-CoV-2
SPASSQTSAKSLARSQ

SEQ ID NO: 2374 - protein, 11 aa, SARS-CoV-2
APRITFGGPSD

SEQ ID NO: 2375 - protein, 15 aa, SARS-CoV-2
ITFGGPSDSTGSNQN

SEQ ID NO: 2376 - protein, 4 aa, SARS-CoV-2
RRPQ

SEQ ID NO: 2377 - protein, 16 aa, SARS-CoV-2
IRGGDGKMKDLSPRWY

SEQ ID NO: 2378 - protein, 15 aa, SARS-CoV-2
GDGKMKDLSPRWYFY

SEQ ID NO: 2379 - protein, 13 aa, SARS-CoV-2
GLPYGANKDGIIW

SEQ ID NO: 2380 - protein, 16 aa, SARS-CoV-2
PYGANKDGIIWVATEG

SEQ ID NO: 2381 - protein, 16 aa, SARS-CoV-2
GANKDGIIWVATEGAL

SEQ ID NO: 2382 - protein, 15 aa, SARS-CoV-2
KDGIIWVATEGALNT

SEQ ID NO: 2383 - protein, 6 aa, SARS-CoV-2
QGTTLP

SEQ ID NO: 2384 - protein, 1 aa, SARS-CoV-2
L

SEQ ID NO: 2385 - protein, 15 aa, SARS-CoV-2
NQLESKMSGKGQQQQ

SEQ ID NO: 2386 - protein, 11 aa, SARS-CoV-2
SGKGQQQQGQT

SEQ ID NO: 2387 - protein, 13 aa, SARS-CoV-2
TVTKKSAAEASKK

SEQ ID NO: 2388 - protein, 14 aa, SARS-CoV-2
AAEASKKPRQKRTA

SEQ ID NO: 2389 - protein, 16 aa, SARS-CoV-2
AIKLDDKDPNFKDQVI

SEQ ID NO: 2390 - protein, 13 aa, SARS-CoV-2
DKDPNFKDQVILL

SEQ ID NO: 2391 - protein, 16 aa, SARS-CoV-2
HIDAYKTFPPTEPKKD

SEQ ID NO: 2392 - protein, 10 aa, SARS-CoV-2
LPQRQKKQQT

SEQ ID NO: 2393 - protein, 9 aa, SARS-CoV-2
RITFGGPSD

SEQ ID NO: 2394 - protein, 6 aa, SARS-CoV-2
RRPQGL

SEQ ID NO: 2395 - protein, 16 aa, SARS-CoV-2
VRGGDGKMKDLSPRWY

SEQ ID NO: 2396 - protein, 15 aa, SARS-CoV-2
GDGKMKDLSPRWYFY

SEQ ID NO: 2397 - protein, 16 aa, SARS-CoV-2
EGIIWVATEGALNTPK

SEQ ID NO: 2398 - protein, 9 aa, SARS-CoV-2
LPQGTALPK

SEQ ID NO: 2399 - protein, 16 aa, SARS-CoV-2
QGTALPKGFYAEGSRG

SEQ ID NO: 2400 - protein, 1 aa, SARS-CoV-2
L

SEQ ID NO: 2401 - protein, 10 aa, SARS-CoV-2
KMSGKGSQQQ

SEQ ID NO: 2402 - protein, 13 aa, SARS-CoV-2
TVTKKSAAEASKK

SEQ ID NO: 2403 - protein, 14 aa, SARS-CoV-2
AAEASKKPRQKRTA

SEQ ID NO: 2404 - protein, 16 aa, SARS-CoV-2
KLDDKDPSFKDNVILL

SEQ ID NO: 2405 - protein, 15 aa, SARS-CoV-2
DKDPSFKDNVILLNK

SEQ ID NO: 2406 - protein, 16 aa, SARS-CoV-2
HIDAYKTFPPTEPKKD

SEQ ID NO: 2407 - protein, 15 aa, SARS-CoV-2
ESQPLPQRQKKQQTV

SEQ ID NO: 2408 - protein, 14 aa, SARS-CoV-2
LPQRQKKQQTVTLL

SEQ ID NO: 2409 - protein, 12 aa, SARS-CoV-2
APRITFGGPTDS

SEQ ID NO: 2410 - protein, 5 aa, SARS-CoV-2
RRPQG

SEQ ID NO: 2411 - protein, 16 aa, SARS-CoV-2
VRGGDGKMKELSPRWY

SEQ ID NO: 2412 - protein, 16 aa, SARS-CoV-2
GGDGKMKELSPRWYFY

SEQ ID NO: 2413 - protein, 15 aa, SARS-CoV-2
GIVWVATEGALNTPK

SEQ ID NO: 2414 - protein, 6 aa, SARS-CoV-2
QGTTLP

SEQ ID NO: 2415 - protein, 16 aa, SARS-CoV-2
SQASSRSSSRSRGNSR

SEQ ID NO: 2416 - protein, 8 aa, SARS-CoV-2
LLDRLNQL

SEQ ID NO: 2417 - protein, 16 aa, SARS-CoV-2
LNQLESKVSGKGQQQQ

SEQ ID NO: 2418 - protein, 13 aa, SARS-CoV-2
SGKGQQQQGQTVT

SEQ ID NO: 2419 - protein, 13 aa, SARS-CoV-2
TVTKKSAAEASKK

SEQ ID NO: 2420 - protein, 14 aa, SARS-CoV-2
AAEASKKPRQKRTA

SEQ ID NO: 2421 - protein, 16 aa, SARS-CoV-2
KLDDKDPQFKDNVILL

SEQ ID NO: 2422 - protein, 16 aa, SARS-CoV-2
DDKDPQFKDNVILLNK

SEQ ID NO: 2423 - protein, 16 aa, SARS-CoV-2
HIDAYKTFPPTEPKKD

SEQ ID NO: 2424 - protein, 16 aa, SARS-CoV-2
TDEAQPLPQRQKKQPT

SEQ ID NO: 2425 - protein, 7 aa, SARS-CoV-2
PAADMDD

SEQ ID NO: 2426 - protein, 15 aa, SARS-CoV-2
MDDFSRQLQNSMSGA

SEQ ID NO: 2427 - protein, 10 aa, SARS-CoV-2
RITFGGPTDS

SEQ ID NO: 2428 - protein, 5 aa, SARS-CoV-2
RRPQG

SEQ ID NO: 2429 - protein, 16 aa, SARS-CoV-2
VRGGDGKMKELSPRWY

SEQ ID NO: 2430 - protein, 16 aa, SARS-CoV-2
GGDGKMKELSPRWYFY

SEQ ID NO: 2431 - protein, 15 aa, SARS-CoV-2
GIVWVATEGALNTPK

SEQ ID NO: 2432 - protein, 6 aa, SARS-CoV-2
QGTTLP

SEQ ID NO: 2433 - protein, 16 aa, SARS-CoV-2
SQASSRSSSRSRGNSR

SEQ ID NO: 2434 - protein, 8 aa, SARS-CoV-2
LLDRLNQL

SEQ ID NO: 2435 - protein, 16 aa, SARS-CoV-2
LNQLESKVSGKGQQQQ

SEQ ID NO: 2436 - protein, 13 aa, SARS-CoV-2
SGKGQQQQGQTVT

SEQ ID NO: 2437 - protein, 13 aa, SARS-CoV-2
TVTKKSAAEASKK

SEQ ID NO: 2438 - protein, 14 aa, SARS-CoV-2
AAEASKKPRQKRTA

SEQ ID NO: 2439 - protein, 16 aa, SARS-CoV-2
KLDDKDPQFKDNVILL

SEQ ID NO: 2440 - protein, 16 aa, SARS-CoV-2
DDKDPQFKDNVILLNK

SEQ ID NO: 2441 - protein, 16 aa, SARS-CoV-2
HIDAYKTFPPTEPKKD

SEQ ID NO: 2442 - protein, 16 aa, SARS-CoV-2
TDEAQPLPQRQKKQPT

SEQ ID NO: 2443 - protein, 7 aa, SARS-CoV-2
PAADMDD

SEQ ID NO: 2444 - protein, 15 aa, SARS-CoV-2
MDDFSRQLQNSMSGA

SEQ ID NO: 2445 - protein, 15 aa, SARS-CoV-2
AVKDGIVWVHEDGAT

SEQ ID NO: 2446 - protein, 16 aa, SARS-CoV-2
SRASSLSRNSSRSSSQ

SEQ ID NO: 2447 - protein, 16 aa, SARS-CoV-2
SPASSQTSAKSLARSQ

SEQ ID NO: 2448 - protein, 21 aa, SARS-CoV-2
QNQRNAPRITFGGPSDSTGSN

SEQ ID NO: 2449 - protein, 17 aa, SARS-CoV-2
RITFGGPSDSTGSNQNG

SEQ ID NO: 2450 - protein, 28 aa, SARS-CoV-2
QNGERSGARSKQRRPQGLPNNTASWFTA

SEQ ID NO: 2451 - protein, 16 aa, SARS-CoV-2
IRGGDGKMKDLSPRWY

SEQ ID NO: 2452 - protein, 17 aa, SARS-CoV-2
GGDGKMKDLSPRWYFYY

SEQ ID NO: 2453 - protein, 19 aa, SARS-CoV-2
PEAGLPYGANKDGIIWVAT

SEQ ID NO: 2454 - protein, 16 aa, SARS-CoV-2
PYGANKDGIIWVATEG

SEQ ID NO: 2455 - protein, 16 aa, SARS-CoV-2
GANKDGIIWVATEGAL

SEQ ID NO: 2456 - protein, 17 aa, SARS-CoV-2
NKDGIIWVATEGALNTP

SEQ ID NO: 2457 - protein, 26 aa, SARS-CoV-2
NNAAIVLQLPQGTTLPKGFYAEGSRG

SEQ ID NO: 2458 - protein, 31 aa, SARS-CoV-2; identical to SEQ ID NO: 21

SEQ ID NO: 2459 - protein, 17 aa, SARS-CoV-2
LNQLESKMSGKGQQQQG

SEQ ID NO: 2460 - protein, 21 aa, SARS-CoV-2
LESKMSGKGQQQQGQTVTKKS

SEQ ID NO: 2461 - protein, 19 aa, SARS-CoV-2
QGQTVTKKSAAEASKKPRQ

SEQ ID NO: 2462 - protein, 18 aa, SARS-CoV-2
KSAAEASKKPRQKRTATK

SEQ ID NO: 2463 - protein, 16 aa, SARS-CoV-2
AIKLDDKDPNFKDQVI

SEQ ID NO: 2464 - protein, 19 aa, SARS-CoV-2
KLDDKDPNFKDQVILLNKH

SEQ ID NO: 2465 - protein, 16 aa, SARS-CoV-2
HIDAYKTFPPTEPKKD

SEQ ID NO: 2466 - protein, 22 aa, SARS-CoV-2
ADETQALPQRQKKQQTVTLLPA

SEQ ID NO: 2467 - protein, 33 aa, SARS-CoV-2; identical to SEQ ID NO: 18

SEQ ID NO: 2468 - protein, 23 aa, SARS-CoV-2
GPQARAPRITFGGPSDSTDNNQN

SEQ ID NO: 2469 - protein, 26 aa, SARS-CoV-2
GDRSGARPKQRRPQGLPNNTASWFTA

SEQ ID NO: 2470 - protein, 16 aa, SARS-CoV-2
VRGGDGKMKDLSPRWY

SEQ ID NO: 2471 - protein, 17 aa, SARS-CoV-2
GGDGKMKDLSPRWYFYY

SEQ ID NO: 2472 - protein, 16 aa, SARS-CoV-2
EGIIWVATEGALNTPK

SEQ ID NO: 2473 - protein, 23 aa, SARS-CoV-2
NAAIVLQLPQGTALPKGFYAEGS

SEQ ID NO: 2474 - protein, 16 aa, SARS-CoV-2
QGTALPKGFYAEGSRG

SEQ ID NO: 2475 - protein, 31 aa, SARS-CoV-2
ARIAGNGGDAALALLLLDRLNALESKMSGKG

SEQ ID NO: 2476 - protein, 22 aa, SARS-CoV-2
LNALESKMSGKGSQQQSQTVTK

SEQ ID NO: 2477 - protein, 19 aa, SARS-CoV-2
QSQTVTKKSAAEASKKPRQ

SEQ ID NO: 2478 - protein, 18 aa, SARS-CoV-2
KSAAEASKKPRQKRTATK

SEQ ID NO: 2479 - protein, 16 aa, SARS-CoV-2
KLDDKDPSFKDNVILL

SEQ ID NO: 2480 - protein, 17 aa, SARS-CoV-2
DDKDPSFKDNVILLNKH

SEQ ID NO: 2481 - protein, 16 aa, SARS-CoV-2
HIDAYKTFPPTEPKKD

SEQ ID NO: 2482 - protein, 17 aa, SARS-CoV-2
DESQPLPQRQKKQQTVT

SEQ ID NO: 2483 - protein, 18 aa, SARS-CoV-2
QPLPQRQKKQQTVTLLPA

SEQ ID NO: 2484 - protein, 33 aa, SARS-CoV-2; identical to SEQ ID NO: 18

SEQ ID NO: 2485 - protein, 20 aa, SARS-CoV-2
NQRSAPRITFGGPTDSTDNN

SEQ ID NO: 2486 - protein, 27 aa, SARS-CoV-2
NGGRNGARPKQRRPQGLPNNTASWFTA

SEQ ID NO: 2487 - protein, 16 aa, SARS-CoV-2
VRGGDGKMKELSPRWY

SEQ ID NO: 2488 - protein, 16 aa, SARS-CoV-2
GGDGKMKELSPRWYFY

SEQ ID NO: 2489 - protein, 17 aa, SARS-CoV-2
EGIVWVATEGALNTPKD

SEQ ID NO: 2490 - protein, 26 aa, SARS-CoV-2
NNAATVLQLPQGTTLPKGFYAEGSRG

SEQ ID NO: 2491 - protein, 16 aa, SARS-CoV-2
SQASSRSSSRSRGNSR

SEQ ID NO: 2492 - protein, 24 aa, SARS-CoV-2
GETALALLLLDRLNQLESKVSGKG

SEQ ID NO: 2493 - protein, 16 aa, SARS-CoV-2
LNQLESKVSGKGQQQQ

SEQ ID NO: 2494 - protein, 19 aa, SARS-CoV-2
SKVSGKGQQQQGQTVTKKS

SEQ ID NO: 2495 - protein, 19 aa, SARS-CoV-2
QGQTVTKKSAAEASKKPRQ

SEQ ID NO: 2496 - protein, 18 aa, SARS-CoV-2
KSAAEASKKPRQKRTATK

SEQ ID NO: 2497 - protein, 16 aa, SARS-CoV-2
KLDDKDPQFKDNVILL

SEQ ID NO: 2498 - protein, 16 aa, SARS-CoV-2
DDKDPQFKDNVILLNK

SEQ ID NO: 2499 - protein, 16 aa, SARS-CoV-2
HIDAYKTFPPTEPKKD

SEQ ID NO: 2500 - protein, 16 aa, SARS-CoV-2
TDEAQPLPQRQKKQPT

SEQ ID NO: 2501 - protein, 25 aa, SARS-CoV-2
KKQPTVTLLPAADMDDFSRQLQNSM

SEQ ID NO: 2502 - protein, 17 aa, SARS-CoV-2
DMDDFSRQLQNSMSGAS

SEQ ID NO: 2503 - protein, 22 aa, SARS-CoV-2
NQRSAPRITFGGPTDSIDNNQN

SEQ ID NO: 2504 - protein, 27 aa, SARS-CoV-2
NGGRNGARPKQRRPQGLPNNTASWFTA

SEQ ID NO: 2505 - protein, 16 aa, SARS-CoV-2
VRGGDGKMKELSPRWY

SEQ ID NO: 2506 - protein, 16 aa, SARS-CoV-2
GGDGKMKELSPRWYFY

SEQ ID NO: 2507 - protein, 17 aa, SARS-CoV-2
EGIVWVATEGALNTPKD

SEQ ID NO: 2508 - protein, 26 aa, SARS-CoV-2
NNAATVLQLPQGTTLPKGFYAEGSRG

SEQ ID NO: 2509 - protein, 16 aa, SARS-CoV-2
SQASSRSSSRSRGNSR

SEQ ID NO: 2510 - protein, 24 aa, SARS-CoV-2
GETALALLLLDRLNQLESKVSGKG

SEQ ID NO: 2511 - protein, 16 aa, SARS-CoV-2
LNQLESKVSGKGQQQQ

SEQ ID NO: 2512 - protein, 19 aa, SARS-CoV-2
SKVSGKGQQQQGQTVTKKS

SEQ ID NO: 2513 - protein, 19 aa, SARS-CoV-2
QGQTVTKKSAAEASKKPRQ

SEQ ID NO: 2514 - protein, 18 aa, SARS-CoV-2
KSAAEASKKPRQKRTATK

SEQ ID NO: 2515 - protein, 16 aa, SARS-CoV-2
KLDDKDPQFKDNVILL

SEQ ID NO: 2516 - protein, 16 aa, SARS-CoV-2
DDKDPQFKDNVILLNK

SEQ ID NO: 2517 - protein, 16 aa, SARS-CoV-2
HIDAYKTFPPTEPKKD

SEQ ID NO: 2518 - protein, 16 aa, SARS-CoV-2
TDEAQPLPQRQKKQPT

SEQ ID NO: 2519 - protein, 25 aa, SARS-CoV-2
KKQPTVTLLPAADMDDFSRQLQNSM

SEQ ID NO: 2520 - protein, 17 aa, SARS-CoV-2
DMDDFSRQLQNSMSGAS

SEQ ID NO: 2521 - protein, 17 aa, SARS-CoV-2
RAVKDGIVWVHEDGATD

SEQ ID NO: 2522 - protein, 16 aa, SARS-CoV-2
SRASSLSRNSSRSSSQ

SEQ ID NO: 2523 - protein, 16 aa, SARS-CoV-2
SPASSQTSAKSLARSQ

SEQ ID NO: 2524 - protein, 16 aa, SARS-CoV-2
MADSNGTITVEELKKL

SEQ ID NO: 2525 - protein, 16 aa, SARS-CoV-2
LGASQRVAGDSGFAAY

SEQ ID NO: 2526 - protein, 16 aa, SARS-CoV-2
AGHHLGRCDIKDLPKE

SEQ ID NO: 2527 - protein, 16 aa, SARS-CoV-2
KLNTDHSSSSDNIALL

SEQ ID NO: 2528 - protein, 16 aa, SARS-CoV-2
TLSYYKLGASQRVAGD

SEQ ID NO: 2529 - protein, 16 aa, SARS-CoV-2
MSANNGTITVEELKKL

SEQ ID NO: 2530 - protein, 16 aa, SARS-CoV-2
LGASQRVAGDSGFAAY

SEQ ID NO: 2531 - protein, 16 aa, SARS-CoV-2
AGHHLGRCDIKDLPKE

SEQ ID NO: 2532 - protein, 16 aa, SARS-CoV-2
TLSYYKLGASQRVAGD

SEQ ID NO: 2533 - protein, 16 aa, SARS-CoV-2
MADNGTITVEELKQLL

SEQ ID NO: 2534 - protein, 16 aa, SARS-CoV-2
GHSLGRCDIKDLPKEI

SEQ ID NO: 2535 - protein, 16 aa, SARS-CoV-2
LGASQRVGTDSGFAAY

SEQ ID NO: 2536 - protein, 16 aa, SARS-CoV-2
KLNTDHAGSNDNIALL

SEQ ID NO: 2537 - protein, 16 aa, SARS-CoV-2
TLSYYKLGASQRVGTD

SEQ ID NO: 2538 - protein, 16 aa, SARS-CoV-2
MAENGTISVEELKRLL

SEQ ID NO: 2539 - protein, 16 aa, SARS-CoV-2
GHSLGRCDIKDLPKEI

SEQ ID NO: 2540 - protein, 16 aa, SARS-CoV-2
LGASQRVGTDSGFAAY

SEQ ID NO: 2541 - protein, 16 aa, SARS-CoV-2
KLNTDHAGSNDNIALL

SEQ ID NO: 2542 - protein, 16 aa, SARS-CoV-2
TLSYYKLGASQRVGTD

SEQ ID NO: 2543 - protein, 12 aa, SARS-CoV-2
ITADIELALLRA

SEQ ID NO: 2544 - protein, 16 aa, SARS-CoV-2
WTADEAIKFLKEWNFS

SEQ ID NO: 2545 - protein, 16 aa, SARS-CoV-2
YTLSDLPVYVTVAKVQ

SEQ ID NO: 2546 - protein, 16 aa, SARS-CoV-2
TVEELKKLLEQWNLVI

SEQ ID NO: 2547 - protein, 16 aa, SARS-CoV-2
SRYRIGNYKLNTDHSS

SEQ ID NO: 2548 - protein, 16 aa, SARS-CoV-2
KDLPKEITVATSRTLS

SEQ ID NO: 2549 - protein, 12 aa, SARS-CoV-2
SSSSDNIALLVQ

SEQ ID NO: 2550 - protein, 16 aa, SARS-CoV-2
YKLGASQRVAGDSGFA

SEQ ID NO: 2551 - protein, 16 aa, SARS-CoV-2
TVEELKKLLEQWNLVI

SEQ ID NO: 2552 - protein, 16 aa, SARS-CoV-2
SRYRIGNYKLNTDHSN

SEQ ID NO: 2553 - protein, 16 aa, SARS-CoV-2
KDLPKEITVATSRTLS

SEQ ID NO: 2554 - protein, 16 aa, SARS-CoV-2
YKLGASQRVAGDSGFA

SEQ ID NO: 2555 - protein, 16 aa, SARS-CoV-2
TVEELKQLLEQWNLVI

SEQ ID NO: 2556 - protein, 16 aa, SARS-CoV-2
KDLPKEITVATSRTLS

SEQ ID NO: 2557 - protein, 16 aa, SARS-CoV-2
NRYRIGNYKLNTDHAG

SEQ ID NO: 2558 - protein, 12 aa, SARS-CoV-2
AGSNDNIALLVQ

SEQ ID NO: 2559 - protein, 16 aa, SARS-CoV-2
YKLGASQRVGTDSGFA

SEQ ID NO: 2560 - protein, 16 aa, SARS-CoV-2
SVEELKRLLEQWNLVI

SEQ ID NO: 2561 - protein, 16 aa, SARS-CoV-2
KDLPKEITVATSRTLS

SEQ ID NO: 2562 - protein, 16 aa, SARS-CoV-2
NRYRIGNYKLNTDHAG

SEQ ID NO: 2563 - protein, 12 aa, SARS-CoV-2
AGSNDNIALLVQ

SEQ ID NO: 2564 - protein, 16 aa, SARS-CoV-2
YKLGASQRVGTDSGFA

SEQ ID NO: 2565 - protein, 12 aa, SARS-CoV-2
ITADIELALLRA

SEQ ID NO: 2566 - protein, 16 aa, SARS-CoV-2
WTADEAIKFLKEWNFS

SEQ ID NO: 2567 - protein, 16 aa, SARS-CoV-2
YTLSDLPVYVTVAKVQ

SEQ ID NO: 2568 - protein, 8 aa, SARS-CoV-2
TVEELKKL

SEQ ID NO: 2569 - protein, 6 aa, SARS-CoV-2
KDLPKE

SEQ ID NO: 2570 - protein, 10 aa, SARS-CoV-2
SSSSDNIALL

SEQ ID NO: 2571 - protein, 12 aa, SARS-CoV-2
YKLGASQRVAGD

SEQ ID NO: 2572 - protein, 8 aa, SARS-CoV-2
TVEELKKL

SEQ ID NO: 2573 - protein, 6 aa, SARS-CoV-2
KDLPKE

SEQ ID NO: 2574 - protein, 12 aa, SARS-CoV-2
YKLGASQRVAGD

SEQ ID NO: 2575 - protein, 9 aa, SARS-CoV-2
TVEELKQLL

SEQ ID NO: 2576 - protein, 7 aa, SARS-CoV-2
KDLPKEI

SEQ ID NO: 2577 - protein, 10 aa, SARS-CoV-2
AGSNDNIALL

SEQ ID NO: 2578 - protein, 12 aa, SARS-CoV-2
YKLGASQRVGTD

SEQ ID NO: 2579 - protein, 9 aa, SARS-CoV-2
SVEELKRLL

SEQ ID NO: 2580 - protein, 7 aa, SARS-CoV-2
KDLPKEI

SEQ ID NO: 2581 - protein, 10 aa, SARS-CoV-2
AGSNDNIALL

SEQ ID NO: 2582 - protein, 12 aa, SARS-CoV-2
YKLGASQRVGTD

SEQ ID NO: 2583 - protein, 12 aa, SARS-CoV-2
ITADIELALLRA

SEQ ID NO: 2584 - protein, 16 aa, SARS-CoV-2
WTADEAIKFLKEWNFS

SEQ ID NO: 2585 - protein, 16 aa, SARS-CoV-2
YTLSDLPVYVTVAKVQ

SEQ ID NO: 2586 - protein, 24 aa, SARS-CoV-2
MADSNGTITVEELKKLLEQWNLVI

SEQ ID NO: 2587 - protein, 32 aa, SARS-CoV-2; identical to SEQ ID NO: 27

SEQ ID NO: 2588 - protein, 26 aa, SARS-CoV-2
AGHHLGRCDIKDLPKEITVATSRTLS

SEQ ID NO: 2589 - protein, 18 aa, SARS-CoV-2
KLNTDHSSSSDNIALLVQ

SEQ ID NO: 2590 - protein, 20 aa, SARS-CoV-2
TLSYYKLGASQRVAGDSGFA

SEQ ID NO: 2591 - protein, 24 aa, SARS-CoV-2
MSANNGTITVEELKKLLEQWNLVI

SEQ ID NO: 2592 - protein, 32 aa, SARS-CoV-2
LGASQRVAGDSGFAAYSRYRIGNYKLNTDHSN

SEQ ID NO: 2593 - protein, 26 aa, SARS-CoV-2
AGHHLGRCDIKDLPKEITVATSRTLS

SEQ ID NO: 2594 - protein, 20 aa, SARS-CoV-2
TLSYYKLGASQRVAGDSGFA

SEQ ID NO: 2595 - protein, 23 aa, SARS-CoV-2
MADNGTITVEELKQLLEQWNLVI

SEQ ID NO: 2596 - protein, 25 aa, SARS-CoV-2
GHSLGRCDIKDLPKEITVATSRTLS

SEQ ID NO: 2597 - protein, 32 aa, SARS-CoV-2
LGASQRVGTDSGFAAYNRYRIGNYKLNTDHAG

SEQ ID NO: 2598 - protein, 18 aa, SARS-CoV-2
KLNTDHAGSNDNIALLVQ

SEQ ID NO: 2599 - protein, 20 aa, SARS-CoV-2
TLSYYKLGASQRVGTDSGFA

SEQ ID NO: 2600 - protein, 23 aa, SARS-CoV-2
MAENGTISVEELKRLLEQWNLVI

SEQ ID NO: 2601 - protein, 25 aa, SARS-CoV-2
GHSLGRCDIKDLPKEITVATSRTLS

SEQ ID NO: 2602 - protein, 32 aa, SARS-CoV-2; identical to SEQ ID NO: 2597

SEQ ID NO: 2603 - protein, 18 aa, SARS-CoV-2
KLNTDHAGSNDNIALLVQ

SEQ ID NO: 2604 - protein, 20 aa, SARS-CoV-2
TLSYYKLGASQRVGTDSGFA

SEQ ID NO: 2605 - protein, 12 aa, SARS-CoV-2
ITADIELALLRA

SEQ ID NO: 2606 - protein, 16 aa, SARS-CoV-2
WTADEAIKFLKEWNFS

SEQ ID NO: 2607 - protein, 16 aa, SARS-CoV-2
YTLSDLPVYVTVAKVQ

SEQ ID NO: 2608 - protein, 16 aa, SARS-CoV-2
SQPFLMDLEGKQGNFK

SEQ ID NO: 2609 - protein, 16 aa, SARS-CoV-2
LLALHRSYLTPGDSSS

SEQ ID NO: 2610 - protein, 16 aa, SARS-CoV-2
VDCALDPLSETKCTLK

SEQ ID NO: 2611 - protein, 16 aa, SARS-CoV-2
FTVEKGIYQTSNFRVQ

SEQ ID NO: 2612 - protein, 16 aa, SARS-CoV-2
GDEVRQIAPGQTGKIA

SEQ ID NO: 2613 - protein, 16 aa, SARS-CoV-2
IAPGQTGKIADYNYKL

SEQ ID NO: 2614 - protein, 16 aa, SARS-CoV-2
NKCVNFNFNGLTGTGV

SEQ ID NO: 2615 - protein, 16 aa, SARS-CoV-2
FNFNGLTGTGVLTESN

SEQ ID NO: 2616 - protein, 16 aa, SARS-CoV-2
TGVLTESNKKFLPFQQ

SEQ ID NO: 2617 - protein, 16 aa, SARS-CoV-2
TESNKKFLPFQQFGRD

SEQ ID NO: 2618 - protein, 16 aa, SARS-CoV-2
DIADTTDAVRDPQTLE

SEQ ID NO: 2619 - protein, 16 aa, SARS-CoV-2
QDVNCTEVPVAIHADQ

SEQ ID NO: 2620 - protein, 16 aa, SARS-CoV-2
IHADQLTPTWRVYSTG

SEQ ID NO: 2621 - protein, 16 aa, SARS-CoV-2
VYSTGSNVFQTRAGCL

SEQ ID NO: 2622 - protein, 16 aa, SARS-CoV-2
QTRAGCLIGAEHVNNS

SEQ ID NO: 2623 - protein, 16 aa, SARS-CoV-2
VNNSYECDIPIGAGIC

SEQ ID NO: 2624 - protein, 16 aa, SARS-CoV-2
ECDIPIGAGICASYQT

SEQ ID NO: 2625 - protein, 16 aa, SARS-CoV-2
RSVASQSIIAYTMSLG

SEQ ID NO: 2626 - protein, 16 aa, SARS-CoV-2
TQLNRALTGIAVEQDK

SEQ ID NO: 2627 - protein, 16 aa, SARS-CoV-2
TGIAVEQDKNTQEVFA

SEQ ID NO: 2628 - protein, 16 aa, SARS-CoV-2
VKQIYKTPPIKDFGGF

SEQ ID NO: 2629 - protein, 16 aa, SARS-CoV-2
GGFNFSQILPDPSKPS

SEQ ID NO: 2630 - protein, 16 aa, SARS-CoV-2
QILPDPSKPSKRSFIE

SEQ ID NO: 2631 - protein, 16 aa, SARS-CoV-2
PDPSKPSKRSFIEDLL

SEQ ID NO: 2632 - protein, 16 aa, SARS-CoV-2
IAARDLICAQKFNGLT

SEQ ID NO: 2633 - protein, 16 aa, SARS-CoV-2
STASALGKLQDVVNQN

SEQ ID NO: 2634 - protein, 16 aa, SARS-CoV-2
PLQPELDSFKEELDKY

SEQ ID NO: 2635 - protein, 16 aa, SARS-CoV-2
YFKNHTSPDVDLGDIS

SEQ ID NO: 2636 - protein, 16 aa, SARS-CoV-2
SPDVDLGDISGINASV

SEQ ID NO: 2637 - protein, 16 aa, SARS-CoV-2
VDLGDISGINASVVNI

SEQ ID NO: 2638 - protein, 16 aa, SARS-CoV-2
NIQKEIDRLNEVAKNL

SEQ ID NO: 2639 - protein, 16 aa, SARS-CoV-2
CCSCGSCCKFDEDDSE

SEQ ID NO: 2640 - protein, 16 aa, SARS-CoV-2
SQPFLMDLEGKQGNFK

SEQ ID NO: 2641 - protein, 16 aa, SARS-CoV-2
LKSLTVEKGIYQTSNF

SEQ ID NO: 2642 - protein, 16 aa, SARS-CoV-2
KGIYQTSNFRVQPTIS

SEQ ID NO: 2643 - protein, 16 aa, SARS-CoV-2
DKCVNFNFNGLTGTGV

SEQ ID NO: 2644 - protein, 16 aa, SARS-CoV-2
TGVLTTSKKQFLPFQQ

SEQ ID NO: 2645 - protein, 16 aa, SARS-CoV-2
DISDTTDAVRDPQTLE

SEQ ID NO: 2646 - protein, 16 aa, SARS-CoV-2
EVPMAIHAEQLTPAWR

SEQ ID NO: 2647 - protein, 16 aa, SARS-CoV-2
IHAEQLTPAWRVYSAG

SEQ ID NO: 2648 - protein, 16 aa, SARS-CoV-2
NNSYECDIPVGAGICA

SEQ ID NO: 2649 - protein, 16 aa, SARS-CoV-2
SVNQRSIIAYTMSLGA

SEQ ID NO: 2650 - protein, 16 aa, SARS-CoV-2
TQLNRALTGIAVEQDK

SEQ ID NO: 2651 - protein, 16 aa, SARS-CoV-2
TGIAVEQDKNTQEVFA

SEQ ID NO: 2652 - protein, 16 aa, SARS-CoV-2
VKQIYKTPPIKDFGGF

SEQ ID NO: 2653 - protein, 16 aa, SARS-CoV-2
GGFNFLQILPDPSKPS

SEQ ID NO: 2654 - protein, 16 aa, SARS-CoV-2
FNFLQILPDPSKPSKR

SEQ ID NO: 2655 - protein, 16 aa, SARS-CoV-2
FLQILPDPSKPSKRSF

SEQ ID NO: 2656 - protein, 16 aa, SARS-CoV-2
PDPSKPSKRSFIEDLL

SEQ ID NO: 2657 - protein, 16 aa, SARS-CoV-2
IAARDLICAQKFNGLT

SEQ ID NO: 2658 - protein, 16 aa, SARS-CoV-2
STASALGKLQDVVNQN

SEQ ID NO: 2659 - protein, 16 aa, SARS-CoV-2
PLQPELDSFKEELDKY

SEQ ID NO: 2660 - protein, 16 aa, SARS-CoV-2
YFKNHTSPDVDLGDIS

SEQ ID NO: 2661 - protein, 16 aa, SARS-CoV-2
SPDVDLGDISGINASV

SEQ ID NO: 2662 - protein, 16 aa, SARS-CoV-2
VDLGDISGINASVVNI

SEQ ID NO: 2663 - protein, 16 aa, SARS-CoV-2
NIQKEIDRLNEVAKNL

SEQ ID NO: 2664 - protein, 16 aa, SARS-CoV-2
CCSCGSCCKFDEDDSE

SEQ ID NO: 2665 - protein, 16 aa, SARS-CoV-2
TPSSKRFQPFQQFGRD

SEQ ID NO: 2666 - protein, 16 aa, SARS-CoV-2
QDVNCTDVSTAIHADQ

SEQ ID NO: 2667 - protein, 16 aa, SARS-CoV-2
IHADQLTPAWRIYSTG

SEQ ID NO: 2668 - protein, 16 aa, SARS-CoV-2
DTSYECDIPIGAGICA

SEQ ID NO: 2669 - protein, 16 aa, SARS-CoV-2
ECDIPIGAGICASYHT

SEQ ID NO: 2670 - protein, 16 aa, SARS-CoV-2
STSQKSIVAYTMSLGA

SEQ ID NO: 2671 - protein, 16 aa, SARS-CoV-2
LKYFGGFNFSQILPDP

SEQ ID NO: 2672 - protein, 16 aa, SARS-CoV-2
PDPLKPTKRSFIEDLL

SEQ ID NO: 2673 - protein, 16 aa, SARS-CoV-2
PLQPELDSFKEELDKY

SEQ ID NO: 2674 - protein, 16 aa, SARS-CoV-2
YFKNHTSPDVDLGDIS

SEQ ID NO: 2675 - protein, 16 aa, SARS-CoV-2
SPDVDLGDISGINASV

SEQ ID NO: 2676 - protein, 16 aa, SARS-CoV-2
VDLGDISGINASVVNI

SEQ ID NO: 2677 - protein, 16 aa, SARS-CoV-2
NIQKEIDRLNEVAKNL

SEQ ID NO: 2678 - protein, 16 aa, SARS-CoV-2
ACSCGSCCKFDEDDSE

SEQ ID NO: 2679 - protein, 16 aa, SARS-CoV-2
DKGIYQTSNFRVAPSK

SEQ ID NO: 2680 - protein, 16 aa, SARS-CoV-2
TPSSKRFQPFQQFGRD

SEQ ID NO: 2681 - protein, 16 aa, SARS-CoV-2
QDVNCTDVPVAIHADQ

SEQ ID NO: 2682 - protein, 16 aa, SARS-CoV-2
IHADQLTPSWRVYSTG

SEQ ID NO: 2683 - protein, 16 aa, SARS-CoV-2
DTSYECDIPIGAGICA

SEQ ID NO: 2684 - protein, 16 aa, SARS-CoV-2
ECDIPIGAGICASYHT

SEQ ID NO: 2685 - protein, 16 aa, SARS-CoV-2
STSQKSIVAYTMSLGA

SEQ ID NO: 2686 - protein, 16 aa, SARS-CoV-2
QMYKTPTLKDFGGFNF

SEQ ID NO: 2687 - protein, 16 aa, SARS-CoV-2
PDPLKPTKRSFIEDLL

SEQ ID NO: 2688 - protein, 16 aa, SARS-CoV-2
PLQPELDSFKEELDKY

SEQ ID NO: 2689 - protein, 16 aa, SARS-CoV-2
YFKNHTSPDVDLGDIS

SEQ ID NO: 2690 - protein, 16 aa, SARS-CoV-2
SPDVDLGDISGINASV

SEQ ID NO: 2691 - protein, 16 aa, SARS-CoV-2
VDLGDISGINASVVNI

SEQ ID NO: 2692 - protein, 16 aa, SARS-CoV-2
NIQKEIDRLNEVAKNL

SEQ ID NO: 2693 - protein, 16 aa, SARS-CoV-2
ACSCGSCCKFDEDDSE

SEQ ID NO: 2694 - protein, 16 aa, SARS-CoV-2
SNASSSFDCIVNLLFT

SEQ ID NO: 2695 - protein, 16 aa, SARS-CoV-2
SACKTIEDALRLSAHL

SEQ ID NO: 2696 - protein, 16 aa, SARS-CoV-2
RSSRIAGRSALEDLLF

SEQ ID NO: 2697 - protein, 16 aa, SARS-CoV-2
LEDLLFSKVVTSGLGT

SEQ ID NO: 2698 - protein, 16 aa, SARS-CoV-2
LSIADLACAQYYNGIM

SEQ ID NO: 2699 - protein, 16 aa, SARS-CoV-2
LFQTTVELQGLIDQIN

SEQ ID NO: 2700 - protein, 16 aa, SARS-CoV-2
QTTVELQGLIDQINST

SEQ ID NO: 2701 - protein, 16 aa, SARS-CoV-2
STGSRSARSAIEDLLF

SEQ ID NO: 2702 - protein, 16 aa, SARS-CoV-2
GSRSARSAIEDLLFDK

SEQ ID NO: 2703 - protein, 16 aa, SARS-CoV-2
AISASIGDIIQRLDVL

SEQ ID NO: 2704 - protein, 16 aa, SARS-CoV-2
LGNSTGIDFQDELDEF

SEQ ID NO: 2705 - protein, 16 aa, SARS-CoV-2
ITIDKFAIPNGRKVDL

SEQ ID NO: 2706 - protein, 16 aa, SARS-CoV-2
ADSCLQGDKCNIFANF

SEQ ID NO: 2707 - protein, 16 aa, SARS-CoV-2
VTIDCAAFVCGDYAAC

SEQ ID NO: 2708 - protein, 16 aa, SARS-CoV-2
ECSKASSRSAIEDLLF

SEQ ID NO: 2709 - protein, 16 aa, SARS-CoV-2
TSIPNLPDFKEELDQW

SEQ ID NO: 2710 - protein, 16 aa, SARS-CoV-2
KTIEDALRNSARLESA

SEQ ID NO: 2711 - protein, 16 aa, SARS-CoV-2
SGSRVAGRSAIEDILF

SEQ ID NO: 2712 - protein, 16 aa, SARS-CoV-2
LSIADLACAQYYNGIM

SEQ ID NO: 2713 - protein, 16 aa, SARS-CoV-2
ELNYTVQKLQTLIDNI

SEQ ID NO: 2714 - protein, 16 aa, SARS-CoV-2
LAVIGDFNCTNFAIND

SEQ ID NO: 2715 - protein, 16 aa, SARS-CoV-2
VTIDCSLFVCSNYAAC

SEQ ID NO: 2716 - protein, 16 aa, SARS-CoV-2
PHCGSSSRSFFEDLLF

SEQ ID NO: 2717 - protein, 16 aa, SARS-CoV-2
FGAALAMEKVNECVKS

SEQ ID NO: 2718 - protein, 16 aa, SARS-CoV-2
SVPKLSDFESELSHWF

SEQ ID NO: 2719 - protein, 16 aa, SARS-CoV-2
KLSDFESELSHWFKNQ

SEQ ID NO: 2720 - protein, 16 aa, SARS-CoV-2
SQPFLMDLEGKQGNFK

SEQ ID NO: 2721 - protein, 16 aa, SARS-CoV-2
LLALHRSYLTPGDSSS

SEQ ID NO: 2722 - protein, 16 aa, SARS-CoV-2
DCALDPLSETKCTLKS

SEQ ID NO: 2723 - protein, 16 aa, SARS-CoV-2
FTVEKGIYQTSNFRVQ

SEQ ID NO: 2724 - protein, 16 aa, SARS-CoV-2
EVRQIAPGQTGKIADY

SEQ ID NO: 2725 - protein, 16 aa, SARS-CoV-2
IAPGQTGKIADYNYKL

SEQ ID NO: 2726 - protein, 16 aa, SARS-CoV-2
KCVNFNFNGLTGTGVL

SEQ ID NO: 2727 - protein, 16 aa, SARS-CoV-2
FNFNGLTGTGVLTESN

SEQ ID NO: 2728 - protein, 16 aa, SARS-CoV-2
VLTESNKKFLPFQQFG

SEQ ID NO: 2729 - protein, 16 aa, SARS-CoV-2
QQFGRDIADTTDAVRD

SEQ ID NO: 2730 - protein, 16 aa, SARS-CoV-2
DPQTLEILDITPCSFG

SEQ ID NO: 2731 - protein, 16 aa, SARS-CoV-2
VAIHADQLTPTWRVYS

SEQ ID NO: 2732 - protein, 16 aa, SARS-CoV-2
PTWRVYSTGSNVFQTR

SEQ ID NO: 2733 - protein, 16 aa, SARS-CoV-2
GSNVFQTRAGCLIGAE

SEQ ID NO: 2734 - protein, 16 aa, SARS-CoV-2
QTRAGCLIGAEHVNNS

SEQ ID NO: 2735 - protein, 16 aa, SARS-CoV-2
NNSYECDIPIGAGICA

SEQ ID NO: 2736 - protein, 16 aa, SARS-CoV-2
ECDIPIGAGICASYQT

SEQ ID NO: 2737 - protein, 16 aa, SARS-CoV-2
AYTMSLGAENSVAYSN

SEQ ID NO: 2738 - protein, 16 aa, SARS-CoV-2
TQLNRALTGIAVEQDK

SEQ ID NO: 2739 - protein, 16 aa, SARS-CoV-2
IAVEQDKNTQEVFAQV

SEQ ID NO: 2740 - protein, 16 aa, SARS-CoV-2
DFGGFNFSQILPDPSK

SEQ ID NO: 2741 - protein, 16 aa, SARS-CoV-2
GFNFSQILPDPSKPSK

SEQ ID NO: 2742 - protein, 16 aa, SARS-CoV-2
ILPDPSKPSKRSFIED

SEQ ID NO: 2743 - protein, 16 aa, SARS-CoV-2
FIEDLLFNKVTLADAG

SEQ ID NO: 2744 - protein, 16 aa, SARS-CoV-2
IAARDLICAQKFNGLT

SEQ ID NO: 2745 - protein, 16 aa, SARS-CoV-2
STASALGKLQDVVNQN

SEQ ID NO: 2746 - protein, 16 aa, SARS-CoV-2
KEELDKYFKNHTSPDV

SEQ ID NO: 2747 - protein, 16 aa, SARS-CoV-2
HTSPDVDLGDISGINA

SEQ ID NO: 2748 - protein, 16 aa, SARS-CoV-2
PDVDLGDISGINASVV

SEQ ID NO: 2749 - protein, 16 aa, SARS-CoV-2
VDLGDISGINASVVNI

SEQ ID NO: 2750 - protein, 16 aa, SARS-CoV-2
NIQKEIDRLNEVAKNL

SEQ ID NO: 2751 - protein, 12 aa, SARS-CoV-2
EPVLKGVKLHYT

SEQ ID NO: 2752 - protein, 16 aa, SARS-CoV-2
SQPFLMDLEGKQGNFK

SEQ ID NO: 2753 - protein, 16 aa, SARS-CoV-2
LKSLTVEKGIYQTSNF

SEQ ID NO: 2754 - protein, 16 aa, SARS-CoV-2
KGIYQTSNFRVQPTIS

SEQ ID NO: 2755 - protein, 16 aa, SARS-CoV-2
KCVNFNFNGLTGTGVL

SEQ ID NO: 2756 - protein, 16 aa, SARS-CoV-2
FQQFGRDISDTTDAVR

SEQ ID NO: 2757 - protein, 16 aa, SARS-CoV-2
DPQTLEILDITPCSFG

SEQ ID NO: 2758 - protein, 16 aa, SARS-CoV-2
MAIHAEQLTPAWRVYS

SEQ ID NO: 2759 - protein, 16 aa, SARS-CoV-2
TPAWRVYSAGANVFQT

SEQ ID NO: 2760 - protein, 16 aa, SARS-CoV-2
NNSYECDIPVGAGICA

SEQ ID NO: 2761 - protein, 16 aa, SARS-CoV-2
AYTMSLGAENSVAYSN

SEQ ID NO: 2762 - protein, 16 aa, SARS-CoV-2
TQLNRALTGIAVEQDK

SEQ ID NO: 2763 - protein, 16 aa, SARS-CoV-2
IAVEQDKNTQEVFAQV

SEQ ID NO: 2764 - protein, 16 aa, SARS-CoV-2
DFGGFNFLQILPDPSK

SEQ ID NO: 2765 - protein, 16 aa, SARS-CoV-2
GGFNFLQILPDPSKPS

SEQ ID NO: 2766 - protein, 16 aa, SARS-CoV-2
FNFLQILPDPSKPSKR

SEQ ID NO: 2767 - protein, 16 aa, SARS-CoV-2
ILPDPSKPSKRSFIED

SEQ ID NO: 2768 - protein, 16 aa, SARS-CoV-2
FIEDLLFNKVTLADAG

SEQ ID NO: 2769 - protein, 16 aa, SARS-CoV-2
IAARDLICAQKFNGLT

SEQ ID NO: 2770 - protein, 16 aa, SARS-CoV-2
STASALGKLQDVVNQN

SEQ ID NO: 2771 - protein, 16 aa, SARS-CoV-2
KEELDKYFKNHTSPDV

SEQ ID NO: 2772 - protein, 16 aa, SARS-CoV-2
HTSPDVDLGDISGINA

SEQ ID NO: 2773 - protein, 16 aa, SARS-CoV-2
PDVDLGDISGINASVV

SEQ ID NO: 2774 - protein, 16 aa, SARS-CoV-2
VDLGDISGINASVVNI

SEQ ID NO: 2775 - protein, 16 aa, SARS-CoV-2
NIQKEIDRLNEVAKNL

SEQ ID NO: 2776 - protein, 12 aa, SARS-CoV-2
EPVLKGVKLHYT

SEQ ID NO: 2777 - protein, 16 aa, SARS-CoV-2
FQQFGRDVSDFTDSVR

SEQ ID NO: 2778 - protein, 16 aa, SARS-CoV-2
TAIHADQLTPAWRIYS

SEQ ID NO: 2779 - protein, 16 aa, SARS-CoV-2
DQLTPAWRIYSTGNNV

SEQ ID NO: 2780 - protein, 16 aa, SARS-CoV-2
DTSYECDIPIGAGICA

SEQ ID NO: 2781 - protein, 16 aa, SARS-CoV-2
ECDIPIGAGICASYHT

SEQ ID NO: 2782 - protein, 16 aa, SARS-CoV-2
IVAYTMSLGADSSIAY

SEQ ID NO: 2783 - protein, 16 aa, SARS-CoV-2
KYFGGFNFSQILPDPL

SEQ ID NO: 2784 - protein, 16 aa, SARS-CoV-2
FIEDLLFNKVTLADAG

SEQ ID NO: 2785 - protein, 16 aa, SARS-CoV-2
KEELDKYFKNHTSPDV

SEQ ID NO: 2786 - protein, 16 aa, SARS-CoV-2
HTSPDVDLGDISGINA

SEQ ID NO: 2787 - protein, 16 aa, SARS-CoV-2
PDVDLGDISGINASVV

SEQ ID NO: 2788 - protein, 16 aa, SARS-CoV-2
VDLGDISGINASVVNI

SEQ ID NO: 2789 - protein, 16 aa, SARS-CoV-2
NIQKEIDRLNEVAKNL

SEQ ID NO: 2790 - protein, 12 aa, SARS-CoV-2
EPVLKGVKLHYT

SEQ ID NO: 2791 - protein, 16 aa, SARS-CoV-2
KGIYQTSNFRVAPSKE

SEQ ID NO: 2792 - protein, 16 aa, SARS-CoV-2
FQQFGRDVSDFTDSVR

SEQ ID NO: 2793 - protein, 16 aa, SARS-CoV-2
VAIHADQLTPSWRVYS

SEQ ID NO: 2794 - protein, 16 aa, SARS-CoV-2
DQLTPSWRVYSTGNNV

SEQ ID NO: 2795 - protein, 16 aa, SARS-CoV-2
DTSYECDIPIGAGICA

SEQ ID NO: 2796 - protein, 16 aa, SARS-CoV-2
ECDIPIGAGICASYHT

SEQ ID NO: 2797 - protein, 16 aa, SARS-CoV-2
IVAYTMSLGADSSIAY

SEQ ID NO: 2798 - protein, 16 aa, SARS-CoV-2
KDFGGFNFSQILPDPL

SEQ ID NO: 2799 - protein, 16 aa, SARS-CoV-2
FIEDLLFNKVTLADAG

SEQ ID NO: 2800 - protein, 16 aa, SARS-CoV-2
KEELDKYFKNHTSPDV

SEQ ID NO: 2801 - protein, 16 aa, SARS-CoV-2
HTSPDVDLGDISGINA

SEQ ID NO: 2802 - protein, 16 aa, SARS-CoV-2
PDVDLGDISGINASVV

SEQ ID NO: 2803 - protein, 16 aa, SARS-CoV-2
VDLGDISGINASVVNI

SEQ ID NO: 2804 - protein, 16 aa, SARS-CoV-2
NIQKEIDRLNEVAKNL

SEQ ID NO: 2805 - protein, 12 aa, SARS-CoV-2
EPVLKGVKLHYT

SEQ ID NO: 2806 - protein, 16 aa, SARS-CoV-2
SNASSSFDCIVNLLFT

SEQ ID NO: 2807 - protein, 16 aa, SARS-CoV-2
TIEDALRLSAHLETND

SEQ ID NO: 2808 - protein, 16 aa, SARS-CoV-2
SALEDLLFSKVVTSGL

SEQ ID NO: 2809 - protein, 16 aa, SARS-CoV-2
LEDLLFSKVVTSGLGT

SEQ ID NO: 2810 - protein, 16 aa, SARS-CoV-2
LSIADLACAQYYNGIM

SEQ ID NO: 2811 - protein, 16 aa, SARS-CoV-2
LFQTTVELQGLIDQIN

SEQ ID NO: 2812 - protein, 16 aa, SARS-CoV-2
TTVELQGLIDQINSTY

SEQ ID NO: 2813 - protein, 16 aa, SARS-CoV-2
STGSRSARSAIEDLLF

SEQ ID NO: 2814 - protein, 16 aa, SARS-CoV-2
RSAIEDLLFDKVTIAD

SEQ ID NO: 2815 - protein, 16 aa, SARS-CoV-2
ASIGDIIQRLDVLEQD

SEQ ID NO: 2816 - protein, 16 aa, SARS-CoV-2
QDELDEFFKNVSTSIP

SEQ ID NO: 2817 - protein, 16 aa, SARS-CoV-2
ITIDKFAIPNGRKVDL

SEQ ID NO: 2818 - protein, 16 aa, SARS-CoV-2
ADSCLQGDKCNIFANF

SEQ ID NO: 2819 - protein, 16 aa, SARS-CoV-2
VTIDCAAFVCGDYAAC

SEQ ID NO: 2820 - protein, 16 aa, SARS-CoV-2
SAIEDLLFDKVKLSDV

SEQ ID NO: 2821 - protein, 16 aa, SARS-CoV-2
FKEELDQWFKNQTSVA

SEQ ID NO: 2822 - protein, 16 aa, SARS-CoV-2
KTIEDALRNSARLESA

SEQ ID NO: 2823 - protein, 16 aa, SARS-CoV-2
SAIEDILFSKLVTSGL

SEQ ID NO: 2824 - protein, 16 aa, SARS-CoV-2
LSIADLACAQYYNGIM

SEQ ID NO: 2825 - protein, 16 aa, SARS-CoV-2
ELNYTVQKLQTLIDNI

SEQ ID NO: 2826 - protein, 16 aa, SARS-CoV-2
LAVIGDFNCTNFAIND

SEQ ID NO: 2827 - protein, 16 aa, SARS-CoV-2
VTIDCSLFVCSNYAAC

SEQ ID NO: 2828 - protein, 16 aa, SARS-CoV-2
FEDLLFDKVKLSDVGF

SEQ ID NO: 2829 - protein, 16 aa, SARS-CoV-2
FGAALAMEKVNECVKS

SEQ ID NO: 2830 - protein, 16 aa, SARS-CoV-2
SVPKLSDFESELSHWF

SEQ ID NO: 2831 - protein, 16 aa, SARS-CoV-2
DFESELSHWFKNQTSI

SEQ ID NO: 2832 - protein, 16 aa, SARS-CoV-2
SQPFLMDLEGKQGNFK

SEQ ID NO: 2833 - protein, 16 aa, SARS-CoV-2
LLALHRSYLTPGDSSS

SEQ ID NO: 2834 - protein, 15 aa, SARS-CoV-2
DCALDPLSETKCTLK

SEQ ID NO: 2835 - protein, 16 aa, SARS-CoV-2
FTVEKGIYQTSNFRVQ

SEQ ID NO: 2836 - protein, 14 aa, SARS-CoV-2
EVRQIAPGQTGKIA

SEQ ID NO: 2837 - protein, 16 aa, SARS-CoV-2
IAPGQTGKIADYNYKL

SEQ ID NO: 2838 - protein, 15 aa, SARS-CoV-2
KCVNFNFNGLTGTGV

SEQ ID NO: 2839 - protein, 16 aa, SARS-CoV-2
FNFNGLTGTGVLTESN

SEQ ID NO: 2840 - protein, 14 aa, SARS-CoV-2
VLTESNKKFLPFQQ

SEQ ID NO: 2841 - protein, 6 aa, SARS-CoV-2
QQFGRD

SEQ ID NO: 2842 - protein, 6 aa, SARS-CoV-2
DPQTLE

SEQ ID NO: 2843 - protein, 7 aa, SARS-CoV-2
VAIHADQ

SEQ ID NO: 2844 - protein, 9 aa, SARS-CoV-2
PTWRVYSTG

SEQ ID NO: 2845 - protein, 12 aa, SARS-CoV-2
GSNVFQTRAGCL

SEQ ID NO: 2846 - protein, 16 aa, SARS-CoV-2
QTRAGCLIGAEHVNNS

SEQ ID NO: 2847 - protein, 15 aa, SARS-CoV-2
NNSYECDIPIGAGIC

SEQ ID NO: 2848 - protein, 16 aa, SARS-CoV-2
ECDIPIGAGICASYQT

SEQ ID NO: 2849 - protein, 7 aa, SARS-CoV-2
AYTMSLG

SEQ ID NO: 2850 - protein, 16 aa, SARS-CoV-2
TQLNRALTGIAVEQDK

SEQ ID NO: 2851 - protein, 14 aa, SARS-CoV-2
IAVEQDKNTQEVFA

SEQ ID NO: 2852 - protein, 5 aa, SARS-CoV-2
DFGGF

SEQ ID NO: 2853 - protein, 15 aa, SARS-CoV-2
GFNFSQILPDPSKPS

SEQ ID NO: 2854 - protein, 15 aa, SARS-CoV-2
ILPDPSKPSKRSFIE

SEQ ID NO: 2855 - protein, 6 aa, SARS-CoV-2
FIEDLL

SEQ ID NO: 2856 - protein, 16 aa, SARS-CoV-2
IAARDLICAQKFNGLT

SEQ ID NO: 2857 - protein, 16 aa, SARS-CoV-2
STASALGKLQDVVNQN

SEQ ID NO: 2858 - protein, 7 aa, SARS-CoV-2
KEELDKY

SEQ ID NO: 2859 - protein, 12 aa, SARS-CoV-2
HTSPDVDLGDIS

SEQ ID NO: 2860 - protein, 15 aa, SARS-CoV-2
PDVDLGDISGINASV

SEQ ID NO: 2861 - protein, 16 aa, SARS-CoV-2
VDLGDISGINASVVNI

SEQ ID NO: 2862 - protein, 16 aa, SARS-CoV-2
NIQKEIDRLNEVAKNL

SEQ ID NO: 2863 - protein, 16 aa, SARS-CoV-2
SQPFLMDLEGKQGNFK

SEQ ID NO: 2864 - protein, 16 aa, SARS-CoV-2
LKSLTVEKGIYQTSNF

SEQ ID NO: 2865 - protein, 16 aa, SARS-CoV-2
KGIYQTSNFRVQPTIS

SEQ ID NO: 2866 - protein, 15 aa, SARS-CoV-2
KCVNFNFNGLTGTGV

SEQ ID NO: 2867 - protein, 6 aa, SARS-CoV-2
DPQTLE

SEQ ID NO: 2868 - protein, 13 aa, SARS-CoV-2
MAIHAEQLTPAWR

SEQ ID NO: 2869 - protein, 10 aa, SARS-CoV-2
TPAWRVYSAG

SEQ ID NO: 2870 - protein, 16 aa, SARS-CoV-2
NNSYECDIPVGAGICA

SEQ ID NO: 2871 - protein, 8 aa, SARS-CoV-2
AYTMSLGA

SEQ ID NO: 2872 - protein, 16 aa, SARS-CoV-2
TQLNRALTGIAVEQDK

SEQ ID NO: 2873 - protein, 14 aa, SARS-CoV-2
IAVEQDKNTQEVFA

SEQ ID NO: 2874 - protein, 5 aa, SARS-CoV-2
DFGGF

SEQ ID NO: 2875 - protein, 16 aa, SARS-CoV-2
GGFNFLQILPDPSKPS

SEQ ID NO: 2876 - protein, 16 aa, SARS-CoV-2
FNFLQILPDPSKPSKR

SEQ ID NO: 2877 - protein, 13 aa, SARS-CoV-2
ILPDPSKPSKRSF

SEQ ID NO: 2878 - protein, 6 aa, SARS-CoV-2
FIEDLL

SEQ ID NO: 2879 - protein, 16 aa, SARS-CoV-2
IAARDLICAQKFNGLT

SEQ ID NO: 2880 - protein, 16 aa, SARS-CoV-2
STASALGKLQDVVNQN

SEQ ID NO: 2881 - protein, 7 aa, SARS-CoV-2
KEELDKY

SEQ ID NO: 2882 - protein, 12 aa, SARS-CoV-2
HTSPDVDLGDIS

SEQ ID NO: 2883 - protein, 15 aa, SARS-CoV-2
PDVDLGDISGINASV

SEQ ID NO: 2884 - protein, 16 aa, SARS-CoV-2
VDLGDISGINASVVNI

SEQ ID NO: 2885 - protein, 16 aa, SARS-CoV-2
NIQKEIDRLNEVAKNL

SEQ ID NO: 2886 - protein, 7 aa, SARS-CoV-2
FQQFGRD

SEQ ID NO: 2887 - protein, 7 aa, SARS-CoV-2
TAIHADQ

SEQ ID NO: 2888 - protein, 13 aa, SARS-CoV-2
DQLTPAWRIYSTG

SEQ ID NO: 2889 - protein, 16 aa, SARS-CoV-2
DTSYECDIPIGAGICA

SEQ ID NO: 2890 - protein, 16 aa, SARS-CoV-2
ECDIPIGAGICASYHT

SEQ ID NO: 2891 - protein, 10 aa, SARS-CoV-2
IVAYTMSLGA

SEQ ID NO: 2892 - protein, 15 aa, SARS-CoV-2
KYFGGFNFSQILPDP

SEQ ID NO: 2893 - protein, 6 aa, SARS-CoV-2
FIEDLL

SEQ ID NO: 2894 - protein, 7 aa, SARS-CoV-2
KEELDKY

SEQ ID NO: 2895 - protein, 12 aa, SARS-CoV-2
HTSPDVDLGDIS

SEQ ID NO: 2896 - protein, 15 aa, SARS-CoV-2
PDVDLGDISGINASV

SEQ ID NO: 2897 - protein, 16 aa, SARS-CoV-2
VDLGDISGINASVVNI

SEQ ID NO: 2898 - protein, 16 aa, SARS-CoV-2
NIQKEIDRLNEVAKNL

SEQ ID NO: 2899 - protein, 15 aa, SARS-CoV-2
KGIYQTSNFRVAPSK

SEQ ID NO: 2900 - protein, 7 aa, SARS-CoV-2
FQQFGRD

SEQ ID NO: 2901 - protein, 7 aa, SARS-CoV-2
VAIHADQ

SEQ ID NO: 2902 - protein, 13 aa, SARS-CoV-2
DQLTPSWRVYSTG

SEQ ID NO: 2903 - protein, 16 aa, SARS-CoV-2
DTSYECDIPIGAGICA

SEQ ID NO: 2904 - protein, 16 aa, SARS-CoV-2
ECDIPIGAGICASYHT

SEQ ID NO: 2905 - protein, 10 aa, SARS-CoV-2
IVAYTMSLGA

SEQ ID NO: 2906 - protein, 8 aa, SARS-CoV-2
KDFGGFNF

SEQ ID NO: 2907 - protein, 6 aa, SARS-CoV-2
FIEDLL

SEQ ID NO: 2908 - protein, 7 aa, SARS-CoV-2
KEELDKY

SEQ ID NO: 2909 - protein, 12 aa, SARS-CoV-2
HTSPDVDLGDIS

SEQ ID NO: 2910 - protein, 15 aa, SARS-CoV-2
PDVDLGDISGINASV

SEQ ID NO: 2911 - protein, 16 aa, SARS-CoV-2
VDLGDISGINASVVNI

SEQ ID NO: 2912 - protein, 16 aa, SARS-CoV-2
NIQKEIDRLNEVAKNL

SEQ ID NO: 2913 - protein, 16 aa, SARS-CoV-2
SNASSSFDCIVNLLFT

SEQ ID NO: 2914 - protein, 12 aa, SARS-CoV-2
TIEDALRLSAHL

SEQ ID NO: 2915 - protein, 8 aa, SARS-CoV-2
SALEDLLF

SEQ ID NO: 2916 - protein, 16 aa, SARS-CoV-2
LEDLLFSKVVTSGLGT

SEQ ID NO: 2917 - protein, 16 aa, SARS-CoV-2
LSIADLACAQYYNGIM

SEQ ID NO: 2918 - protein, 16 aa, SARS-CoV-2
LFQTTVELQGLIDQIN

SEQ ID NO: 2919 - protein, 15 aa, SARS-CoV-2
TTVELQGLIDQINST

SEQ ID NO: 2920 - protein, 16 aa, SARS-CoV-2
STGSRSARSAIEDLLF

SEQ ID NO: 2921 - protein, 11 aa, SARS-CoV-2
RSAIEDLLFDK

SEQ ID NO: 2922 - protein, 13 aa, SARS-CoV-2
ASIGDIIQRLDVL

SEQ ID NO: 2923 - protein, 7 aa, SARS-CoV-2
QDELDEF

SEQ ID NO: 2924 - protein, 16 aa, SARS-CoV-2
ITIDKFAIPNGRKVDL

SEQ ID NO: 2925 - protein, 16 aa, SARS-CoV-2
ADSCLQGDKCNIFANF

SEQ ID NO: 2926 - protein, 16 aa, SARS-CoV-2
VTIDCAAFVCGDYAAC

SEQ ID NO: 2927 - protein, 8 aa, SARS-CoV-2
SAIEDLLF

SEQ ID NO: 2928 - protein, 8 aa, SARS-CoV-2
FKEELDQW

SEQ ID NO: 2929 - protein, 16 aa, SARS-CoV-2
KTIEDALRNSARLESA

SEQ ID NO: 2930 - protein, 8 aa, SARS-CoV-2
SAIEDILF

SEQ ID NO: 2931 - protein, 16 aa, SARS-CoV-2
LSIADLACAQYYNGIM

SEQ ID NO: 2932 - protein, 16 aa, SARS-CoV-2
ELNYTVQKLQTLIDNI

SEQ ID NO: 2933 - protein, 16 aa, SARS-CoV-2
LAVIGDFNCTNFAIND

SEQ ID NO: 2934 - protein, 16 aa, SARS-CoV-2
VTIDCSLFVCSNYAAC

SEQ ID NO: 2935 - protein, 6 aa, SARS-CoV-2
FEDLLF

SEQ ID NO: 2936 - protein, 16 aa, SARS-CoV-2
FGAALAMEKVNECVKS

SEQ ID NO: 2937 - protein, 16 aa, SARS-CoV-2
SVPKLSDFESELSHWF

SEQ ID NO: 2938 - protein, 13 aa, SARS-CoV-2
DFESELSHWFKNQ

SEQ ID NO: 2939 - protein, 16 aa, SARS-CoV-2
SQPFLMDLEGKQGNFK

SEQ ID NO: 2940 - protein, 16 aa, SARS-CoV-2
LLALHRSYLTPGDSSS

SEQ ID NO: 2941 - protein, 17 aa, SARS-CoV-2
VDCALDPLSETKCTLKS

SEQ ID NO: 2942 - protein, 16 aa, SARS-CoV-2
FTVEKGIYQTSNFRVQ

SEQ ID NO: 2943 - protein, 18 aa, SARS-CoV-2
GDEVRQIAPGQTGKIADY

SEQ ID NO: 2944 - protein, 16 aa, SARS-CoV-2
IAPGQTGKIADYNYKL

SEQ ID NO: 2945 - protein, 17 aa, SARS-CoV-2
NKCVNFNFNGLTGTGVL

SEQ ID NO: 2946 - protein, 16 aa, SARS-CoV-2
FNFNGLTGTGVLTESN

SEQ ID NO: 2947 - protein, 18 aa, SARS-CoV-2
TGVLTESNKKFLPFQQFG

SEQ ID NO: 2948 - protein, 26 aa, SARS-CoV-2
TESNKKFLPFQQFGRDIADTTDAVRD

SEQ ID NO: 2949 - protein, 26 aa, SARS-CoV-2
DIADTTDAVRDPQTLEILDITPCSFG

SEQ ID NO: 2950 - protein, 25 aa, SARS-CoV-2
QDVNCTEVPVAIHADQLTPTWRVYS

SEQ ID NO: 2951 - protein, 23 aa, SARS-CoV-2
IHADQLTPTWRVYSTGSNVFQTR

SEQ ID NO: 2952 - protein, 20 aa, SARS-CoV-2
VYSTGSNVFQTRAGCLIGAE

SEQ ID NO: 2953 - protein, 16 aa, SARS-CoV-2
QTRAGCLIGAEHVNNS

SEQ ID NO: 2954 - protein, 17 aa, SARS-CoV-2
VNNSYECDIPIGAGICA

SEQ ID NO: 2955 - protein, 16 aa, SARS-CoV-2
ECDIPIGAGICASYQT

SEQ ID NO: 2956 - protein, 25 aa, SARS-CoV-2
RSVASQSIIAYTMSLGAENSVAYSN

SEQ ID NO: 2957 - protein, 16 aa, SARS-CoV-2
TQLNRALTGIAVEQDK

SEQ ID NO: 2958 - protein, 18 aa, SARS-CoV-2
TGIAVEQDKNTQEVFAQV

SEQ ID NO: 2959 - protein, 27 aa, SARS-CoV-2
VKQIYKTPPIKDFGGFNFSQILPDPSK

SEQ ID NO: 2960 - protein, 17 aa, SARS-CoV-2
GGFNFSQILPDPSKPSK

SEQ ID NO: 2961 - protein, 17 aa, SARS-CoV-2
QILPDPSKPSKRSFIED

SEQ ID NO: 2962 - protein, 26 aa, SARS-CoV-2
PDPSKPSKRSFIEDLLFNKVTLADAG

SEQ ID NO: 2963 - protein, 16 aa, SARS-CoV-2
IAARDLICAQKFNGLT

SEQ ID NO: 2964 - protein, 16 aa, SARS-CoV-2
STASALGKLQDVVNQN

SEQ ID NO: 2965 - protein, 25 aa, SARS-CoV-2
PLQPELDSFKEELDKYFKNHTSPDV

SEQ ID NO: 2966 - protein, 20 aa, SARS-CoV-2
YFKNHTSPDVDLGDISGINA

SEQ ID NO: 2967 - protein, 17 aa, SARS-CoV-2
SPDVDLGDISGINASVV

SEQ ID NO: 2968 - protein, 16 aa, SARS-CoV-2
VDLGDISGINASVVNI

SEQ ID NO: 2969 - protein, 16 aa, SARS-CoV-2
NIQKEIDRLNEVAKNL

SEQ ID NO: 2970 - protein, 27 aa, SARS-CoV-2
CCSCGSCCKFDEDDSEPVLKGVKLHYT

SEQ ID NO: 2971 - protein, 16 aa, SARS-CoV-2
SQPFLMDLEGKQGNFK

SEQ ID NO: 2972 - protein, 16 aa, SARS-CoV-2
LKSLTVEKGIYQTSNF

SEQ ID NO: 2973 - protein, 16 aa, SARS-CoV-2
KGIYQTSNFRVQPTIS

SEQ ID NO: 2974 - protein, 17 aa, SARS-CoV-2
DKCVNFNFNGLTGTGVL

SEQ ID NO: 2975 - protein, 29 aa, SARS-CoV-2
TGVLTTSKKQFLPFQQFGRDISDTTDAVR

SEQ ID NO: 2976 - protein, 26 aa, SARS-CoV-2
DISDTTDAVRDPQTLEILDITPCSFG

SEQ ID NO: 2977 - protein, 19 aa, SARS-CoV-2
EVPMAIHAEQLTPAWRVYS

SEQ ID NO: 2978 - protein, 22 aa, SARS-CoV-2
IHAEQLTPAWRVYSAGANVFQT

SEQ ID NO: 2979 - protein, 16 aa, SARS-CoV-2
NNSYECDIPVGAGICA

SEQ ID NO: 2980 - protein, 24 aa, SARS-CoV-2
SVNQRSIIAYTMSLGAENSVAYSN

SEQ ID NO: 2981 - protein, 16 aa, SARS-CoV-2
TQLNRALTGIAVEQDK

SEQ ID NO: 2982 - protein, 18 aa, SARS-CoV-2
TGIAVEQDKNTQEVFAQV

SEQ ID NO: 2983 - protein, 27 aa, SARS-CoV-2
VKQIYKTPPIKDFGGFNFLQILPDPSK

SEQ ID NO: 2984 - protein, 16 aa, SARS-CoV-2
GGFNFLQILPDPSKPS

SEQ ID NO: 2985 - protein, 16 aa, SARS-CoV-2
FNFLQILPDPSKPSKR

SEQ ID NO: 2986 - protein, 19 aa, SARS-CoV-2
FLQILPDPSKPSKRSFIED

SEQ ID NO: 2987 - protein, 26 aa, SARS-CoV-2
PDPSKPSKRSFIEDLLFNKVTLADAG

SEQ ID NO: 2988 - protein, 16 aa, SARS-CoV-2
IAARDLICAQKFNGLT

SEQ ID NO: 2989 - protein, 16 aa, SARS-CoV-2
STASALGKLQDVVNQN

SEQ ID NO: 2990 - protein, 25 aa, SARS-CoV-2
PLQPELDSFKEELDKYFKNHTSPDV

SEQ ID NO: 2991 - protein, 20 aa, SARS-CoV-2
YFKNHTSPDVDLGDISGINA

SEQ ID NO: 2992 - protein, 17 aa, SARS-CoV-2
SPDVDLGDISGINASVV

SEQ ID NO: 2993 - protein, 16 aa, SARS-CoV-2
VDLGDISGINASVVNI

SEQ ID NO: 2994 - protein, 16 aa, SARS-CoV-2
NIQKEIDRLNEVAKNL

SEQ ID NO: 2995 - protein, 27 aa, SARS-CoV-2
CCSCGSCCKFDEDDSEPVLKGVKLHYT

SEQ ID NO: 2996 - protein, 25 aa, SARS-CoV-2
TPSSKRFQPFQQFGRDVSDFTDSVR

SEQ ID NO: 2997 - protein, 25 aa, SARS-CoV-2
QDVNCTDVSTAIHADQLTPAWRIYS

SEQ ID NO: 2998 - protein, 19 aa, SARS-CoV-2
IHADQLTPAWRIYSTGNNV

SEQ ID NO: 2999 - protein, 16 aa, SARS-CoV-2
DTSYECDIPIGAGICA

SEQ ID NO: 3000 - protein, 16 aa, SARS-CoV-2
ECDIPIGAGICASYHT

SEQ ID NO: 3001 - protein, 22 aa, SARS-CoV-2
STSQKSIVAYTMSLGADSSIAY

SEQ ID NO: 3002 - protein, 17 aa, SARS-CoV-2
LKYFGGFNFSQILPDPL

SEQ ID NO: 3003 - protein, 26 aa, SARS-CoV-2
PDPLKPTKRSFIEDLLFNKVTLADAG

SEQ ID NO: 3004 - protein, 25 aa, SARS-CoV-2
PLQPELDSFKEELDKYFKNHTSPDV

SEQ ID NO: 3005 - protein, 20 aa, SARS-CoV-2
YFKNHTSPDVDLGDISGINA

SEQ ID NO: 3006 - protein, 17 aa, SARS-CoV-2
SPDVDLGDISGINASVV

SEQ ID NO: 3007 - protein, 16 aa, SARS-CoV-2
VDLGDISGINASVVNI

SEQ ID NO: 3008 - protein, 16 aa, SARS-CoV-2
NIQKEIDRLNEVAKNL

SEQ ID NO: 3009 - protein, 27 aa, SARS-CoV-2
ACSCGSCCKFDEDDSEPVLKGVKLHYT

SEQ ID NO: 3010 - protein, 17 aa, SARS-CoV-2
DKGIYQTSNFRVAPSKE

SEQ ID NO: 3011 - protein, 25 aa, SARS-CoV-2
TPSSKRFQPFQQFGRDVSDFTDSVR

SEQ ID NO: 3012 - protein, 25 aa, SARS-CoV-2
QDVNCTDVPVAIHADQLTPSWRVYS

SEQ ID NO: 3013 - protein, 19 aa, SARS-CoV-2
IHADQLTPSWRVYSTGNNV

SEQ ID NO: 3014 - protein, 16 aa, SARS-CoV-2
DTSYECDIPIGAGICA

SEQ ID NO: 3015 - protein, 16 aa, SARS-CoV-2
ECDIPIGAGICASYHT

SEQ ID NO: 3016 - protein, 22 aa, SARS-CoV-2
STSQKSIVAYTMSLGADSSIAY

SEQ ID NO: 3017 - protein, 24 aa, SARS-CoV-2
QMYKTPTLKDFGGFNFSQILPDPL

SEQ ID NO: 3018 - protein, 26 aa, SARS-CoV-2
PDPLKPTKRSFIEDLLFNKVTLADAG

SEQ ID NO: 3019 - protein, 25 aa, SARS-CoV-2
PLQPELDSFKEELDKYFKNHTSPDV

SEQ ID NO: 3020 - protein, 20 aa, SARS-CoV-2
YFKNHTSPDVDLGDISGINA

SEQ ID NO: 3021 - protein, 17 aa, SARS-CoV-2
SPDVDLGDISGINASVV

SEQ ID NO: 3022 - protein, 16 aa, SARS-CoV-2
VDLGDISGINASVVNI

SEQ ID NO: 3023 - protein, 16 aa, SARS-CoV-2
NIQKEIDRLNEVAKNL

SEQ ID NO: 3024 - protein, 27 aa, SARS-CoV-2
ACSCGSCCKFDEDDSEPVLKGVKLHYT

SEQ ID NO: 3025 - protein, 16 aa, SARS-CoV-2
SNASSSFDCIVNLLFT

SEQ ID NO: 3026 - protein, 20 aa, SARS-CoV-2
SACKTIEDALRLSAHLETND

SEQ ID NO: 3027 - protein, 24 aa, SARS-CoV-2
RSSRIAGRSALEDLLFSKVVTSGL

SEQ ID NO: 3028 - protein, 16 aa, SARS-CoV-2
LEDLLFSKVVTSGLGT

SEQ ID NO: 3029 - protein, 16 aa, SARS-CoV-2
LSIADLACAQYYNGIM

SEQ ID NO: 3030 - protein, 16 aa, SARS-CoV-2
LFQTTVELQGLIDQIN

SEQ ID NO: 3031 - protein, 17 aa, SARS-CoV-2
QTTVELQGLIDQINSTY

SEQ ID NO: 3032 - protein, 16 aa, SARS-CoV-2
STGSRSARSAIEDLLF

SEQ ID NO: 3033 - protein, 21 aa, SARS-CoV-2
GSRSARSAIEDLLFDKVTIAD

SEQ ID NO: 3034 - protein, 19 aa, SARS-CoV-2
AISASIGDIIQRLDVLEQD

SEQ ID NO: 3035 - protein, 25 aa, SARS-CoV-2
LGNSTGIDFQDELDEFFKNVSTSIP

SEQ ID NO: 3036 - protein, 16 aa, SARS-CoV-2
ITIDKFAIPNGRKVDL

SEQ ID NO: 3037 - protein, 16 aa, SARS-CoV-2
ADSCLQGDKCNIFANF

SEQ ID NO: 3038 - protein, 16 aa, SARS-CoV-2
VTIDCAAFVCGDYAAC

SEQ ID NO: 3039 - protein, 24 aa, SARS-CoV-2
ECSKASSRSAIEDLLFDKVKLSDV

SEQ ID NO: 3040 - protein, 24 aa, SARS-CoV-2
TSIPNLPDFKEELDQWFKNQTSVA

SEQ ID NO: 3041 - protein, 16 aa, SARS-CoV-2
KTIEDALRNSARLESA

SEQ ID NO: 3042 - protein, 24 aa, SARS-CoV-2
SGSRVAGRSAIEDILFSKLVTSGL

SEQ ID NO: 3043 - protein, 16 aa, SARS-CoV-2
LSIADLACAQYYNGIM

SEQ ID NO: 3044 - protein, 16 aa, SARS-CoV-2
ELNYTVQKLQTLIDNI

SEQ ID NO: 3045 - protein, 16 aa, SARS-CoV-2
LAVIGDFNCTNFAIND

SEQ ID NO: 3046 - protein, 16 aa, SARS-CoV-2
VTIDCSLFVCSNYAAC

SEQ ID NO: 3047 - protein, 26 aa, SARS-CoV-2
PHCGSSSRSFFEDLLFDKVKLSDVGF

SEQ ID NO: 3048 - protein, 16 aa, SARS-CoV-2
FGAALAMEKVNECVKS

SEQ ID NO: 3049 - protein, 16 aa, SARS-CoV-2
SVPKLSDFESELSHWF

SEQ ID NO: 3050 - protein, 19 aa, SARS-CoV-2
KLSDFESELSHWFKNQTSI

SEQ ID NO: 3051 - protein, 26 aa, SARS-CoV-2
PDPSKPSKRSFIEDLLFNKVTLADAG

SEQ ID NO: 3052 - protein, 26 aa, Bat CoV RaTG13
PDPSKPSKRSFIEDLLFNKVTLADAG

SEQ ID NO: 3053 - protein, 26 aa, Pangolin CoV
PDPSKPSKRSFIEDLLFNKVTLADAG

SEQ ID NO: 3054 - protein, 26 aa, SARS-CoV
PDPLKPTKRSFIEDLLFNKVTLADAG

SEQ ID NO: 3055 - protein, 26 aa, MERS-CoV
ISTGSRSARSAIEDLLFDKVTIADPG

SEQ ID NO: 3056 - protein, 24 aa, HCoV-HKU1
PCGSSSRSFFEDLLFDKVKLSDVG

SEQ ID NO: 3057 - protein, 26 aa, HCoV-OC43
SECSKASSRSAIEDLLFDKVKLSDVG

SEQ ID NO: 3058 - protein, 26 aa, HCoV-NL63
IRSSRIAGRSALEDLLFSKVVTSGLG

SEQ ID NO: 3059 - protein, 26 aa, HCoV-229E
TSGSRVAGRSAIEDILFSKLVTSGLG

SEQ ID NO: 3060 - protein, 24 aa, SARS-CoV-2
PLQPELDSFKEELDKYFKNTSPDV

SEQ ID NO: 3061 - protein, 24 aa, Bat CoV RaTG13
PLQPELDSFKEELDKYFKNTSPDV

SEQ ID NO: 3062 - protein, 24 aa, Pangolin CoV
PLQPELDSFKEELDKYFKNTSPDV

SEQ ID NO: 3063 - protein, 24 aa, SARS-CoV
PLQPELDSFKEELDKYFKNTSPDV

SEQ ID NO: 3064 - protein, 44 aa, MERS-CoV
YVAPQVTYQNISTNLPPPLLGNSTGIDFQDELDEFFKNVSTSIP

SEQ ID NO: 3065 - protein, 24 aa, HCoV-HKU1
HSVPKLSDFESELSWFKNQTSIAP

SEQ ID NO: 3066 - protein, 25 aa, HCoV-OC43
TSIPNLPDFKEELDQWFKNQTSVAP

SEQ ID NO: 3067 - protein, 26 aa, HCoV-NL63
TVIPDYVDVNKTLQEFAQNLPKYVKP

SEQ ID NO: 3068 - protein, 27 aa, HCoV-229E
TIVPEYIDVNKTLQELSYKLPNYTVPD

SEQ ID NO: 3069 - protein, 22 aa, SARS-CoV-2
SGKSVDMYIERAGDITWEKDAE

SEQ ID NO: 3070 - protein, 16 aa, SARS-CoV-2
SGKSVDMYIERAGDIT

SEQ ID NO: 3071 - protein, 16 aa, SARS-CoV-2
GKSVDMYIERAGDITW

SEQ ID NO: 3072 - protein, 16 aa, SARS-CoV-2
KSVDMYIERAGDITWE

SEQ ID NO: 3073 - protein, 16 aa, SARS-CoV-2
SVDMYIERAGDITWEK

SEQ ID NO: 3074 - protein, 16 aa, SARS-CoV-2
VDMYIERAGDITWEKD

SEQ ID NO: 3075 - protein, 16 aa, SARS-CoV-2
DMYIERAGDITWEKDA

SEQ ID NO: 3076 - protein, 16 aa, SARS-CoV-2
MYIERAGDITWEKDAE
